United States Patent Application Publication US 2006/0183128 A1 - sequence listing, part 3

SEQ ID NO: 205 - DNA, 4647455 bp, Homo Sapiens (residues 3,098,305-4,647,455 of 4,647,455)
  unsure (4267840): unknown base
catgggtggcgggcgcctgtaattccagctacttgggaggctgaggcagaagaatcgcttgaacctgggaggtggaggttgcagtgagctgatatggcgccattgcactgcgccattgcacttcaccctgggcaacagagcaagactccatctcaaaaaaaaaaagctgtagataatggggtcccactatggtgctcaagctggtctgaaactcctgggctcaagtgattgtcttgccttggcctccgaacacttctgccttggcctcccaaagtgttggaattgacaggcgtgagctgccatgcccagcctcagcttttattgtagatttagggggtatatgtgcagttttgttacttgggttcattgtatgatgctgaggtttggggtaggattatccccatcacccaggtagtgggcatagtacccaatagttattaaacctttgccccatttcctctccccagtgtctgttgccatctttatgtccatgtatactcaacatttagctcccacttacaagtaagaacatatggtatctggttttctgttctgtattgattcactgaggatcatggcctgtggttgcatccatgttgctgcaaaggatatgaaatcgtttttttattggtgcatctcatatggttctaatgttctttttattatttttcaggaatttgctgacacaatatcttccgcctggtgctgggcatatcctaagaacttacaactttcctgtattatcctgtgtgagcagctgtcaccttattgggggaaaaatgcctgaaaattagggggcacttcaagtagatagcttctatttcctatatttgtcttatatacaagtatttgcttttatcaaaataattccaataaagcattttaaagtaaagaagacgtggtttggtctcagaacaatggtacaaaaagattaagggggctgggcgcaagttgctcatgcctataatcccagcactttgggaggccgaggtgggtggatcacaaggtcaggagattgagattatcctggccaacatggtgaaaccctgtctctactaaaacaaaggacaaaaattagctgggtgtggtgatacatacctgtaatcccaactactcgggaggctgaggcaggagaatggctttgaaccagggagtccaaggttgcagtgagccgagatcgtgccactgcacttccagcctggcgacaggctccgtcttaaaaaaaaagaaagatgaagccccgtgagctagttaatgctgagttaggcttaactcttaagcctaatattagagattcttggttgggtgacatagtattatgtataatacactagacttttgacaatcatttgagatggtttttctggcaggggaggaggtggagtttcgcccttgttgcccatgctggagtgcaatggcaaaatctcgcctcactgcaacctctgcatcttgagttcaagtgattctcctgcctcacagcctcctgagtagctgggattacaggcgcctggcacctcccctagctattttttgtacttttagtagagacaaggtttcaccatgttggccaggctggtctcgaactcctgacctcaggtgatccacccacctcaagccatccgcctgcctcagcctcccaaagtgttgggattacaggtgtgagccactgtgcctggccgaatttgagttttttttaatgattgtaaagtgtccacggctacccaattagccatctttttttttttgagacagttgcaccttgtcacctgggctggaatatagtggcgcagtttgggttcactgcagcctctccccgggttcaagtgattttcgtgcctcagcgttcccagtagctggggctacagctgcacaccttatttttgtattttttgaagagataggggtttcaccatattggccagggtggtttcgaactcctgacctcaaatgatgtgcctggccagaacattaccaataactttgaaacaaacctgtctgattcaatttctctttttcttcttcctacttggagaattaactgggtatatcatcctctggcttttcttaatagttttactgagtgcattgctaaacaatatcattttaattttgcgtatcttttgaactttgtaaaaatggaatgattcaccagacacgagacaacatttttcttttttggggggatggagtcttgcactgtcgcccaggctagagtgcagtggcgtgatctcgactcatactgcaatctctgcctcccaggttcaccccattattctgcctgggcctcccaaatcactgggactacaggtgcccgccaccatgccccgctaattttttgtatttctagtagagatgggggtttcaccatgttggccaggctggtctcgaactcccgaccttgtgatttgcccaccttggactcccaaagtgctggcattacaaacagccaccatgctggcccatttttcatttttcaaaaagaataaatcttcatgtgttctactgcaactttctgcttttctggggggcgggggggacagagtcttgctctgtcgccaggctggagtgcagtggcgcgatagctcactgcaacctccacctcccaggttcaagcgatttctcctccctcagcctcccgagtagctgggaccacaggcgcgcaccactatgcccagctaatttttgtatttttactagagacggggtttcaccacattggccagggtggtctccaactcctagcctcaccgtccgcccgcctcggcctcctgaaatgctgggattacaggcgtgagccaccacgcctgacatttacttatttcatttatctttgagatggagtctcgctctgtcgcccaggcagcatgtagtggcgcgatctcggctcactgcaagctctgcctcccaggttcaagccattctcctgcctcagcctccggagtagctgggactacaggtgcccggctaatttttttgtatttttagtagagacgggtttcattgtgttagccaggatggtcttggatctcctgacctcgtgatccgcccgccttggcctcccaaagtgcagggattacaggcgtgagccatcgcgcccagccttttttgttttttgagacatagttttgctcttgttccccaggctggagtgcagtggcactatcttggctcaccacaacctctgcctcctgggttcaagcgattctcctgccttagcctgccaagtagctgggattatatgccaccacgcccggctaattttgtatttttattagagatggggtttctccatgttggtcgggctggtctcccgaacttaggtgatccgccagcctcagcctctgaaagtgaaagtgctgtgattctaggccagagccaccacacctggcctgcaacttttgttgttgttcatgtattttcctgtagttcatttgtagtccacccttccatacacatttgtggacataaaaaacttcagggcctggcatggtggctcatgcccgtaatcgcagctgaggcggacagatcacctgaggtcaggggttagggaccagcctggccaacatggtgaaaccccatctctactaaaaaaaatataaaaaagggccaggctcacgcctgtaatcccagcactttaggaggccgaggcgggcagatcacgaggtcaggagatcaagaccatcctgtctaacacggtgaaaccccgtctctactaaaaatacaaaaatcagccgggcgtggtggcgggcgcctgtagtcccagctcctcgggaggctgaggcaggagaatggcgtgaacccgggaggtggagcttgcagtgagtcaagatcccgccactgcactccagcctgcgcgacagagtgagactccatctcaattagggccaggcatggtggctcacgcctgtaatcccagcactttgggaggccgaggcaggtggatcacctaaggtcaggagttcgagaccagcctggccaacatggcaaaaccctgtctctactaaaaatacaaaaataaattagccaggtgtggtggcacacgcctgtaatcccagcgactcgggaggctgacgcaggagaatcacttgaacctggcaggcggaggttgcagtgagctgagatcatgccattatgctctagcctgggcaacaagaatgaaactacatctcaaaatacatacatacatacatacagttaaccgagcatggtggcatgcgcctgtaagcccagctacttgggaggctgaggcatgagaatcgcttgaacctgagaggtggaggttgcagtgaaccaagatggcaccactgcactccagcctgggtgacagagtgagactgtttcaaaaagattcaggagccagactgaacacttactgctaggttaactttggctaagttcctcagtgattcccataacaatttccttgtttgtaaatagataacagagttcctacccaccctctttttttttttttcttcagtagtagagatagggtttcaccatgttggccaggctggtctcaaactcctgactccaggtgattcacccacctcccaaagtgttgggattacaggtgtgagccactgcaccgggcctaccctctcttttttttgagacagggtgtcactgttgcccaggctcgagtacagtggcaagattacagctcactacagccttgacctcctgggctcaagtgatcctcccacctcagcctctgaagtagctggaactacaggtgctccatcatgcccagctaatttttttttctttttgaaagagaatcttgctttgtcgcccaagttggagtgcagtggtgcaatctcggctcactgcaagctccacctcctgggttcacaccattctcctgcctcagcctcccgactagctgggactacaggcacccaccaccacggccagctaattttttgtatttttagtaaagatggggtttcaccgtgttagccaggatggtttcgatctcctgacctcgtgatccacctgccttggcctcccaaagtgctgggattacaggcgtgagctaccgtacctgaccttttttttttttttttgagacggagtcttgctctgtcacccaggctggagtgcagtggcgcgatcttggctcactgcaagctctgcctctcaggttcacgccattctcctgcctcagcctcccgagtagcaggaactacaggtgccagccaccacgcctggctaatttttttgtattttaggtagagacgaggtttcaccgtgttagccaggatggtctcgatctcctgacctcatgatctacctgcctcggcctcccaaagtgctgggattacaggtgagccaccgcgcccagccatgcccagctaatttttaaattttttatacagtgaaggtttcactatattgcctgactggtgtctaactcctgaaatcaaatgatctacctgctttggcctccccaaatgctgagattacaagcttgagccaccaagcccggcctatcccgtctctaacaaaaaagaagcatagtgcggtggctcacacctgcaaccccagcactgtgggaggccatggtgggcagatctcttgaacccaggagtttgagaccagtctgcctgggcaacacggtgaaatccagttcctacaaaaaattttaaaaattagccggttgtgatggcatgccgtggttcagctacttgggaggctgagatgggagaattgcttgagccctggaagttgaggctgcagtgagccatgattgtgccactgcactccaatctgggcaacagagtgagccttatctctaaataaataaatgaagaggtagagtcatgctctgttgcccaggtctgacttgaactcctgggctgaagtgatcctcccgcctcagcttcctcagtagctggggcaacaggcatatgccaccatactcagctttgttggtttcatttcttgtccccaagggtctcttctgcattcccctgccctttgtatggttcaagtcctcccctgtgtggtgggtgctaatcccaggtttggggtataagactgagctacagccatggtaagatggtcacgtgaacttcttttctcacacagtggtgatgctgaaagacctcaaccccaaaatgctattttcctcatttctttttttttttttttgagacggagtctcgctctgtcgcccaggctggagtgcagtggcgcgatctcggctcactgcaagctccgccttccgggttcacgccattctcctgcctcagcctcccgattagctgggaatacaggcgtccaccactacacccggctaattttttgtatatttagtagagacggggtttcaccgtgttagccaggatggtctcgatctcctgacctcgtgatccacccgccttggcctcccaaagtgctgggattacaggcgtgagccaccgccggcctattttcctcatttctttaggccccatttccataccaggagtggagcaacttcagtaataaacagtcctccttcccatcctcccaggctgaactccccagcttgcagttactctaatagcggctagcctgctacttcagctactgtaggcagtgagcctcctaaggcttggcctcagcctgtctccccacagaaatgggagacaagaatccttggaatccttacccactggccagtgtgctggccctccaggtgacacctctacctgccagttgcttaggctagacccttggaatctgcctgactgctctcctgttctcacatgctacatctaatttgtcagcaaatcatactgtctgtatcttagaaatgacacgaggatctgtgtctcacacctttactgctgctccatcctggtgggagccaccattggctctcacctagacaactgcaactgtctcctacctggtctcctggcttccacttttgcccgttacaggctctctccacacagcagccagaaggttccttccaaatcaggagtcaggtcatgtctcccctcttctgaagatcctgtaacagctgccatttcactcagagtaaaagtctccatcttacaagggccacccaacaaggtcctcccagtctagctctgtcaactttctgacctcatcttctacacctgaggtcaggggttggggaccagcctggccaacatggtgaaaccccatttccactctgcttcagccatgctacagaaacccaggagctgcttggagctcttttgtcagtgttcgaggagtaaaatttctacccattggccagagtcacagccgcaggctttgtggggtacacccaaacctgcaccaacagaactcatggatgaaatttgcatcttttgggttgtgaggaaattctagagcccagaaataaccttaaaaacttttggggctgggtgcagtgtctcatgcctgtaattccagcgctttgggaggccgaagcaggtggatcacttgaggccaggagtttgagaccaacctggtcaacatggcgaaaccctgtctctactaaaaatacaaaaattagccaagtgtggtggtgcacacctgtaatcccagatactctgatggctgaggcatgagaattgcttgaacccaggaggtggaggttgcagtgagccaagattgaacccctgcactccagcctgggcaaaagcatgagactctgtctcaaaaaaaacaaaaccaacaactagtggtacgtaatgtttacatattagttgtatgtaacattaatatatgtttacatactggtagtatgtaagcatatgtaatgtgcctggcctctcatttcttatttttgcatgtctgaaatatttcttagtatcttaaaaacatagcttgggggctgggtatggtgactcatgcctgtaatcccagcactttgggaggccaaggtgggaggatcacctgagcccaggagttcgagaccagcctgggtaatattgcaagacaccatctctaaaaataaaaaccaaaaaaaacaacaaagatacacaataaacaagataaacagcagaccaactaaatgaagaattagtgagttggagggagaaataatccataatgtggagcagagaaatcagaggtgatatgaaaaggaagttttgaaacatgaaggatggaatgagatactccaactccagagctgctttgtttttgtttttgagatgggagtcttgctctgttgcccaggctggagtgcagtggcatgatctcagctcactgcaacctacgcctcccaggttcaagcgatgctcctgactcagcctcctgagtagctgggattacaggtggtgccaccacgtctggataatttttgtatttttagtagagacaaggtttcaccgtgttggtcaggttggtcttgaactcctgaccttgtgattcacctgcctcgccctcccaaagtgctgggattacaggcgtgagccactgcacccagcctactttgtttgttacatggatttgttacctgcagccagaacagccacagagccatcatgagctctgctgcccaatggcgtacaggggtacctggtttttagcatctcaggcccatctgttagtttgttgattgtagtactttcttttcattagcattctactttcccatgactttttttgggggggagtggggtggacagggtctcactgtgttgtccaggctgtagtgcactggagccatcttggctcactgcagcctctgcctcctgagccaccaagcctggctgttttttttttttttttttttaattcttgtgttattttccaaagactatataaagaaacaaattatcctaagggttaaagtacctgctgactcttgaaatgttaaactttattgcctccagtcaggtgaacctcaggtggaagtgggtcacattctaggctggctgttgcctgtcttaaattctaaagaatgtagtgaagataaaggtgtcagctgataatccccagttatttactgatggcagataataaactgggaagggggagccttcttcaaagggccttgcagcattagctggtaccaccttgaaacagggagcaagtcccatctcctagtgccacccagggaatacctgtgctccacactgggttgattgcctctaaaagaggcagaggaactgttataaaacaaaaaaaaaaacttttaaaagttttggttgggcgtggtggctaatgtctgtaatcccagtactttgggaggtcaaggcaggaggattgctggagtgcaggagtttgaggccagcctgggcggagaccacttctctacaaaattaaaaaattaggtgtactcccaagcacctgtagtcccagctacttgggaggctgagatggaaggatcacttgagcccagaaggtcgaggctacagagccatgattgttccactcactgctctccggcctgtgcgacagaccaagaccctgtatctaaaaggaagaaaaaagaaaattggcaaaaacaatgatattagcatctgtatgtacttatatttggtaggatcatttcaaagtatattaaagagattatgacattttatccctttgtatttgagtatgcatctccaaaaaataaggatgttcatctgcatattcacaatactattatacctgagaaaagcaaatttaattccctaatagcacttaatattcaggccagttaccatggctcacacctgtagtcccagcactttggaaggccgaggttggtggattgcttgagcccaggagttcaagaccagcctgggcaacatgtcgagacctcgtgtcttcaaaaaatacaaaaattagcaggtgtggtggcacacacctgtggttccaaccactcatggggctgaggtgggaggactgcttgagcctgggaggtcaaggctgaagtgagctatgattgcagtactgcactccaggctgggtgacagagtgagaccctgtctttaaaagaagtgtgttgttgagcacagtggctcacggctgtaatcccagcactttgggaggcggaggcaggtggatcacctgaggtcaggagtttgagaccagcctggccaacatggagaaaccccatcgctactaaaaatacaaaaattagccgggtgtggtggtgaacacctgtaatcccagctactcttgagaatctgaggcaggagaattacttgaatctgggagtcggaggttgcagtgagccgagatcatgccactgcactctagcctgggtgacagagcgagactctgtctcaaaaaaaaaaaaaaaaaaaagtgtgtgtgtgagtgtggctggggggagagagtgagagagtagaggaggaaaaagtttaaaacagtttgggagtttggagagtttttcgtgaaacacagactcatcaacctttttattttttcactctaattttttttttcttcagacagagtcttgctctgtttcccaggctggagtgcagtggcaccatctcagctcactgcaagctctgccttccaggttcactccattctcctgcttcagcttcccaagtagctgggactacaggctcccgccaccacgcccggctaatattttgtatttttagtagagacagtgtttcaccgtgttagccaggaggtctggatctcctgaccttgtgatccgcccgccttggcctcccaaagtgctgggattacaggcatgagccaccgtgcccggcctaaaaaatttttttataaaagtatttgacctaatgtgctgtgggtttcttatttgtttgtttttgagacaagtttcttgccctgtcgcccaggtttgagggcagtggtgcggtcttggtgcactacagcctctacctcctgggctcaagtgaccctctcacctcagcttcccatgtagctgaaactacaggtgtgggccactgccccagctaatttttaaattttttgtagagatgaggtcttgccatgttgcccaggctggtctcaaactcctgggctcaaatgatctgcccgtcttggccttccaaagtactgggactgggattacaggcatgtaattaccgcctctggccagctttttttttttttttttttttttgagacagagtctcgctcttgttgccgaggctggagtgcagtggcgtgatctcggctcacttcagccttcccctctcgggttcaagcgattctcctgcctcagcctcctcagtagctggcattacaggcatgcactaccacgcctggctaatttttgtatttttagtagagacgggggtttcaccatgttggccaggctggtcttgaactcctgacctcaggtgatccgcccgccttggcctccccaaagtgctgggtggcgtgagccactgtgcccagcctaattttgtatttttagtagagactgggtttctccatgttggtgaggctggtcttgaactcctgacctcaggtgattcgcctgccttggcctcccaaaatgctgggattacagacatgagccaccgcgcccggcctcttttttttttttttttgggacagagtctcactgtgtcaccaggctggagtgcagtggcatgatctcggcttactgcaacctctgcctcccaggttcaagcgattcttctgcctcagcctcccgagtagctgagactacaggggcatgccaccacacccagctaatttttgtatttttagtagagaccagcctggtcaacatggtgaaaacccatctctactaaaaatacaaaaaattagccaggtgtggtggtgggcacctataatcccaaatactcaggaggctgaggcaggagaatcacttgaacctgggacacggaggttgcagtgagttgagatcacgccactgcactccagcctgcctgggcaacagagcaagactctgtctcaaaaaaaaaaaaaaatcccagagtattaggaaaaggaagacctatacttctactatggtaatttgagtctgttgtggttttgttgttgttgttgttgttgttggaaagatgtccaagccattgctttgatcttccttcccaatcctttcttgggcaaaaattattagatggctatgggtgggcaggcctgtaactctagcactttgggaggccgagcgggtggggtggtcaaggatcacttgagcccaggagtttaagaccagcctgggcaacatagtgggaccctgtttctacaaaaatgaaaatattagctgggcttggtggcaagtgcctgtagtcccagctactcaggaggctgaggtgggaagattgcttgaacccaggtggtcaaggttgcagtgagctgtgatcatgctactgcactccagcctgggtgacagagtaagaccctgtctcaaaaaaaaaaaaaaaatactttttcctattccctccttgtcatgacttttggttggaaggattacattagcaaaaaagtatccatggtccctggtccctggtatttgctgttcaggtcagtgttcattgttactgtctctttcccttatttaagggacagctgagaagacagagagagcttgagctggtttgatcctaagcaaaggggctgggagtggggatcaatgtgtgaagggaaggagggccatgcaaggtgaaaggggatgttggggaaagggtttcatgctagaatttggctgctgatccagcgggcactcaccaggcaatgatgtgcaaagtccaccgtaaaaagaaaacaaaacttcaggactctaagtttatgccaagatggaagttaagccttggagactgaatcatgtagcatgtttgcaattctgcttcttacagactctcctccacattgctcttgttctgtaatgagacctcctttccaatcactgatctttgttgtagattaactgcctcctttattgtcctgtacctgactcagaccagatggcacccaagaccccatgactattgcatcttcagtgtggaatgtaaaaaacaccttcccccaccccccaaaaaagaaaaaaaaaattgactaatcagatcattgtaactatgcaataagccttaccatagaactgagagttgacagcgtgctgacagccctcgcagcccttgctggctctcggcgcctcctcggccttggcgcccattctggccgcgcttgaggagcccttcagcccgccactgcaccgtgggagccttctctgggctggccgaggccggagccggctccctcggcttgcggggaggtgtggagggagaggcgcgggcgggaaccggggctgcacgcagcgcttgtgggccagcgcaagttccgggtgggcgtgggctcggctgccccgctcttggagcggcaggctggcccacaagccccgggcagggcagtgaggggtttagcacctgggccagcagcttgctgtgctcgatttctcacggggccttagctgcctcaccacaggacaggactcaggacctgcagcccgccatgcctgagccccaaccccgccgtgggctcctgtgctgcagagcctccccgacgagcgccaccccctgctccacggcccccagtcccatcaacctcccaagggctgaagagcgcaggcgcatggggcaggactggcaagcagctccacctgcggccccagtgcgggatccactgggtgaagccagctgggctcctgagtgtggtggggacttggagaacctttatgtctagctaagggattgtaaatacaccaatcggcactctgtatctagctcaaggtttgtaaatataccaatcagcatcctgtgtctagctcagggtttgtaaatgcaccaatcgacactgtatctagctaatctagtgaggacatggagaacttttgtgtctagctcagggattgtaaacgaaccaatcagcaccctgtcaaaatggaccaatcagctctctgtaaaacggaccaatcagctctctgtaaaatggaccaatcagcaggatgtgggtggggccagataagggaataaaagcaggctgcctgagtgagtagtgacatcccgctctggtcattttccatagagtggaaggtttgttatttccgtctttgcaataaattttattgctatttgttctttgggtccacactacttttatgaggtgtaacactcaccgcaggggtatgcagtttcactcctgacgctagcgagagcacgaaccccccgggaggaacaaacaactccagaggcgccgcatttaagaactgtaacactccccgtgagggtctgcggcctcattctttaaatcaatgagaccaagaacccaccaattgtgaacacagaacaatgttgaaattctaagtttccataaactttctgtttatataagcgattccaaacttctacacttttggaacatagactaatattctttggaatcttcagctctagacgggccacttcctcaacatttgcagttggataaactctttttttttttttttttttttttttaaatttatttttttattgataattcttgggtgtttctcacagagggggatttggcagggtcatgggacaatagtggagggaaggtcagcagataaacaagtgaacaaaggtctctggttttcctaggcagaggaccctgcggccttccgcagtgtttgtgtccctgattacttgagattagggattggtgatgactcccaacgagcaccctgccttcaagcatctgtttaacaaagcacatcttgcaccgcccttaatccatttaaccctgagtggacacagcacatgtttcagagagcacagggttgggggtaaggtcacagatcaacaggatcccaaggcagaggaatttttcttagtgcagaacaaaatgaaaagtctcccatgtctacttctttctacacagacacggcaaccatccgatttctcaatcttttccccacctttcctgcctttctattccacaaagccgccattgtcatcctggcccgttctcaatgagctgttgggcacacctcccagacggggtggtggccgcgcagaggggctcctcacttcccagtaggggcggccgggcagaggcgcccctcacctcccggacggggcggctggccgggcgggggggctgaccccccccacctccctcccggacggggcggctggccgggcggggggctgacacccccacctccctcccggacggggcggctggccgggcagaggggctcctcacttcccagtaggggcggccgggcagaggcgcccctcacctcccggacggggcggctggccgggcgggggggctgaccccccccacctccctcccggacggggcggctggccgggcggggggctgacacccccacctccctcccggacggggcggctggccgggcagaggggctcctcacttcccagtaggggcggccgggcagaggcgcccctcacctcccagacggggaggctggccgggcggagggctgacccccccacctccctcccggacagggcggctggccaggcggggggctgacccccccacctccctcccggaccgggcggctggccgggtgggggggctgacccccccatctccctcccggacggggtggctggccgggctgaggggctcctcacttcccagtaggggtggccgggcagaggcacccctcacctcccggacggggcggctggccgggcggggggctgacccccccacctccctcccggacggcacggctggccaggtggggggctgacccccccacctccctcccggatggcacggctggccggtcgggggggctgaccccccacctccctcccagatggggcggctggccgggcggggggttgaccccccccacctccctcccggacggggtggctgccgggcggagatgctcctcacttcccagatggggtggctgcggggcggagaggctcctcacttctcagacggggtggttgccaggcagagggtctcctcacttctcagacggggcggccgggcagagacgctcctcacctcccagacggggtctcggccgggcagaggcactcctcacatcccagatggggcggcggggcagaggcgctccccacatctcagacgatgggcggccgggcagagacgctcctcacttcctagatgtgatggcggctgggaagaggcgctcctcacttcttagatgggatggcggccgggcggagacgctcctcactttccagactgggcagccaggcagaggggctcctcacatcccagacgatgggcggccaggcagagacgctcctcacttcccagacggggtggcggccgggcagaggctgcaatctcggcactttgggaggccaaggcaggcggctgggaggtgtaggttgtagtgagccgagatcacgccactgcactccagcctgggcaccattgagcactgagtgaacgagactccgtctgcaatcccggcacctcgggaggctgaggttggcgggatcactcgcggttaggggctggagacctgcccggccaacacagcgaaaccccgtctccaccaaaaccagtcaggcatggcggcgcgtgcctgcaatggcaggcactgggcaggctgaggcaggagaatcaggcagggaggttgcagtgagccgagatggcagcagtacagtccagcttcggctccgcatgagagggagaccgtggggagagggagacagagggagagggagggagagccggtggataaactctttaaactagattctaagcctggtacagtggtatgtgcctgcagtcccaactctatctactctaggaggctgaggcaggaggatcccttgaacttcagtctgaatctaacctgggcaacatggcaagactccatctgtaaaaagcaacaacactagattctcagcttttgttcgtttgtttaagacagtctcgctgtgtctcccagactggaatgcaatggtatgatcttggcccactgtaacctctcgctcccgggttcaagcgattctccttcctcagtctcctgaatagctgggactacaggcgcgacccacaacacccagctaatttttgtatttttggtagagacggggtttcgtcatgttgaccaggatggtcttgaactcctgacttcaggtgattcgcttgcctctgcctcccaaagtgctgggattataggtgtgagccacagcgcctggcctagattctgaactttttaattattattttttagattgataacacttaccccgatttttttttttttgagggagagtctcgctccatagcccaggctggagtgcagtggcatgatttcaactcactgcaatctccgtctcccaggttcaagcgattctcctgccttagtctcctgagtagctgggattgtaggtgcctgccacaatgcctggctaattttttgaatttttagtagagacagtgtttcaccatgttggccagactggtcttgaactcctgacctcaagtgatcccccttcctcagcctcccaaagtgctaggattacaggcgtgagccaccgtgcccagccaacttgccccaatttttaaataacttattttattttattttttaaatatttccttggccgggtggggtggctcacacctgtaatcccggcactttgggaggccgaggcgggcgtattgcctgaggtcaggagttcgagaccagtctggccaacatggtgaaaccgggtctctactaaaaataccaaaaaattagccgagcgtggtggcaggcgcctgtaatcccagctacttaggaggctgaggcaggggaattgcttgaaccagcgaggcagaggttgcggggagccaagattgcgccactgcactccagcctgggcaacagagcaagactctgtctcaaaaaaaaaaaaaaaatttcctcacagagtagagctaactcataagcagtgtgcccagagtcggcccactttgtcccattagtacaaacaagctctttcccctttcagtctcctgccacttgtcccaatctttcctgtgtatttttttttttttttaagatgaagtcttgctctgtcgcccaggctggagggcagtggcataatctcggctcactgcaacctctgcctcccaggttcaagtgagtctcctgcctcaggctcccgagtagctgggactacaggcgtgtgccaccacatatggctaatatttgtatttttagtagagatggggttttaccatgttggccaggctggtctagaacccctgaccttgtgatccgcccacctcggcctcccaaagtgctgggattacaggcgtgagccactgcacctgacccttccctgtgtattaaaagaaaaaaaaaaagctggaaaaaaaaggttctttaactatttctgcaactttgacgtacatataattcattttagctggacacttgcacttgtttaaaagttctgaccctggttttcaaacttaaacgtattacgaatcacccagaaggcttgttaatgcctggtggctccaacaccagagcttcagattccatgggtctgtaaagagtgagggagggaaggtcaagctttttttctttcttgaaggttttttgttttggtttggttttttggagatgaggtctcactctgtcacctaggttggtgtgcagtggtgcaatcatagctcactactgcctcgaactcctggggtcaaagagatcaagccatcctcccatgtagctaggactataggtgtgcgttaccatgcttggctaatttttaaattttttagacatggggtattgccatgttgcccaggatgccctttaatttgatcatcctgccttggtctcccgaagtgctagcattacagatctgagccaccacacctagccaggaaggtagtgtctgtctctcaagcctcccagcacttctgtttctaacaggtagtagttcatgggtcagacattcatagtgtcctttcctttttgtcttccactatttctttttctttttttttttgagcaagggctctcccacttacctgcaggctgaacagattcttttcataagcatctgcctggggaatattttcttacataatttgccataggaagtgctcacttctctgtcaggctagctgggacaggattcccatctgcatttcacacacttgcaccctatttcatggaggatggtatcctaccccatgttagaaatataaaacagcgtggattttttttttttcagacggagtctcactctgttgccgaggctggtgtgcagtgctgtgatctcagctcactgcaaactccgcctcctggttcaagtgattctcctgcctcagccacctgagtagctgggactataagtgtaagccaacacgcctggctagtttttgtatttttagtagagatgggatttcaccatattggccaggctggtctcgaactcctgaccttgtgatccgcccaccttggcctcccaaagtgctgggattatatgtgtgagccaccacgcttggccaagtgtggattttaaaatatcttacaggctgggtgcaggggctcaagcctgtaatcccagcactttgagagaacatggccggcagattgcttgagctcagcagtttgagaccaacctaggcaatatagtgagactttgtctctactaaaaattaaaaaaatcagcccgccggcaccatggctcatgcttgtaatcacaacactttgggaggccgaggcgggtggatcacctgaggccaggagtttgagaccagcctggccaacatggtgaaactccgtctctactaaaaatacaaaaattagccgggtgtggtggtgggcacctgtaatcccagctattcgggaagctgaggcagaagaatcgcttgaacctgggaggcagaggttgcagtgagccgagatcgcaccactgcactctagcctgggtgccagagcaagactccatctcaaaaaaaaaaaaattaaattaaaaaataaataaataaaaaataaaaaatatcttatggcactcccttcatactcattacacctgtgaagatcaacctgtttctcggtgataagaaggaatgtaggctgggtgcggtggctcatagctgtaacctcagcactttgggaagctgaggcatgaggattgcttaagcacaggagttccataccagcctgggcaacatagcgcaaccttgtctctactgaaaataaaaattaaaaaaattaaccaggcatggtgtcactgacctgtagtcccaactactccggaggctgagacgtgaggatcacttgagcccaggaggttgaggcttcagtgagccgtgattgtgcaactgcactccagcctgggtgacagagcgagccctgtctcaaaaaaagcaacaacaaaaaaagagggcatgtcaaaaggaaaagaggatttgatttgccaaagtcagattttcacaggcagtacgcacatcaggtctctccccagaactcacccaggctcacaaggatacatgaggaaaacagacacgaagatgtgcattgacagaaccatagagactctacaaatattcattatccttcattaaaaattttaagttacaaacattttgattgatagtcagtcatggtggtgcacctagtccttactctgaaaccaaatatcctgccatctggggactttcaccagccctgtcggttatcttaccgcaacaccaaagaggaggctcagccttccccagttccctgagttcacattgattcaattctacagctcactagacctgcccaagacaggaccaatcaatgtcccgggagggcagagagggtggtggggccacacttagccatatggaaagacagtattctcagatgagggcaggacttttttgtgggagaggacgcctagctttcagtcctaaaggaagtgatttccctggtaaagggaaggtgattttgccaaggctggagtctaaaggaagatggaactgtctttcaggcgtctccagcagaccctctacagacccgtgttcctgaaggcagagtcctgaaggcagaatacccctgtggcagtggcacagctcagagtgtcccatagacactgattttggccacggagatgctctctgtgtagtggttccggcctttctcatacaggacgtagagctggggggcctgctcctctccatccatgctgccctccagggttgccagggatgaatagccactggggcctggccatagctggactgtctctttccgccatgaggtaccattgctgaagctccatcgcagggtcaggttcactcctggggagagcaggagagtcagggagagagggtctctgcccaggccttgtctagacacagggctctccctgctgaccccacccatgaggcactcacggaactctggatgtgctgggttggagaagaagacaatgccggagctggtgactacagctcctgcagctaccacagggtccacgagctcagggtcgaaggtcacatcacggggccttagtgtatcacaggcatcatagctgcggaggacaattcggcagtggcagtggtagttgttctggtttcgggcattgatgacgactgagccatctgggagctcatagggctgaggggagaggacaggacctcagggagggaacagggaaaatgccctgtccccgaggggagcaagggtgtgtggcactgagtggagcagtcagaccctgggtctgtgcgtgaaatgatgttctggagggcagggagggtcaaatgggtagggaacatctcatggactcctgacctggcattcatcaggattgaaatcattttcctgcttgggctgaccgtaggggatgccgctgaccccacttccgtagcgccaggaggcaccatgatcatcgctgaggagacagaagactccgtcccgctccagcgtcccatggccacacacgatgaggcggcccttccgtggctcccgctgtttctgtgggaaagggaactgggtgtcacagaaggagactctaggggctcagaggcagggacagagaacccaccacttcccaaatgcaatcacatgtatggtccccttgagttcagcccttgctcactgagggttccagtcagatcccataaatacacaccctgtttgaattaagaagctctcccagggtgtacagctggacatgtgcaccaggggcccagccacagggtgcatgagagcttaaacccaacctgtgctcactcgccaagctgtgcaccctggcacaggcttgtgtctgtccaaagaggcagtgcctttttctactttgcatgagggtattgcatggactaacgcagtcctgttgacaatgccaaatgggaagccaatggcagagttccctcttctcctgataatgtgttcctaccaggatgccctgtctttcaaggaatcccacccaagccagaaaatctgacttcagagaatcttccccttggaaaggagtccatttgggggtatccctcagactctccacaaggcagccccctccacctatctcctaggacagagacctgaataccagagcccggtccaggggcaaacacttcagtgccaatatccagggagagattccggggtgtgctccaggaaacaccatcatccttgctccataccaacatggtagaggccacctggcagccggccttgtgagcacaaagggagtagaaaagaaatactactcctgtctcaacatcgctcactactgccccaaggttcagcccatcggggacatccccatcattgacaatgaacgctgtaggagaccatgtgctgcctgaaaaaaattggaggaagaaacccagagtgagcactctgcaggtaccctttctaccacttcccgttaatttcccaccttctgctagggacctcaggccttccgatggtcccagggtgcaatccaacacttgcactatctatacctcttgtcctgttttatttttctccattgcatttatcaccttgcaacagacaaaaaagtttacttgtttattatgcttgtctgtctccttccagtacaatttaaatcctgagggcagagatttttgatctgttttgttcgtggctatattcatgaaacctaaaatagtgcctggtataggtatatagtacccaataaatgtttgctaagtgaatgtccaactccttggtgatcccaatttccagatcactgtcctagacacttgcccttctcgggttccctctacccctcagggactcaggcaaccaaccctctaagttcccctatcctcagggcccttgggctcattgggctgcccacccatccaacctagcaccggctctttcacccagacatctttataccctggtccatggacctccgcagggcgatgaacttggccccctcatcggatgaggacattttcctcgcctcagcaaaggcgagaagagtgccccgcggagtggctgtgatgagcgggatgcggaaggtgtccactgagccgatctgtctcccgctcacccacagcagttgctccatggtcaccagcggctgcacctgtcatgggaggaggaagggtcaacaaagacaaacttgtcttgggggttttaggaacccacgttccgatgggagagggaggatctaatggggatcccgagtaggggatggggtcccagaacaagaaagaggaacacgaaggggagtttggagcgaagctggaggctcggagcaggggagggtctacgaaaggagaaggcgccttcagggagggaaggggaccccaaaagaggaaggggctcgaatgaggagaaggacggggacccggagagggagaggggctgggagcggtaggaggaaacggggtctgggagaaagaaaagggtcctgtcgcggaaagtcggctcagccgcccgcgttccgggggacactaggtgtcgatcacctgcgcgggtcggggatggggctatgcaaagggtgactcaccagaccgaagtcgttctcagccttggaccaggaggctgccagagacagcagcaggaagatcgcggcaaacacccaaaccctacagcctccccagaagcccagaatccgcggcccccagcgtctgtccgggagcgccgtgctgggtcgctccccagtcatctctccccgcagctgccgcgaccctggcagctagactccacagagtcgggagtcagctgacccggaccctttaaagcgcagatgtcacccttaagcccgccccggtctggaggccccgccgcgcttcccggactctaattggtcttcaagtagctcatctcctcccacgtgatcacgcagcatctcgaagcttgcccttccgattggccctcttggaggccctcttggaggcccggagcgcgtgacccgaacgggaagcggactggctggggtgaagaagggactggcaccatccttattgggctttttgattggccgcggcaccaggacacgtcacaggggcggggccgattttaaagagccgggcgcggaaaaaaaaaggccgcctgtcgtcgtggagagaatgagtcacagatttactgagttaacaaaatatctttaataaaatctttttgtttgtttgttttgttttggagacagagtctgtcacccaggttggagtgcagtggcgcgatctcggctcactgcaacctctgcctcccgggttcaagcgattctcctgcctcagcctcccgagtagctgggatgacaggtgcatgccaccactctcggctaatttttgtatttttaatagagacggaggtttcaccatgttggccaggctggtctcgaactcctgactcaggtgatccgcccgcctcagcctctcaaagtgttggattacaggcgtgagccacggcgcctggcctaaaacctttttttaccacaaaatggagacctgtaaggcgaagtgaggttggatggctggacggtgggggtggggtgcagtcctggatcagggccggagctgtcacttcttcctcttcttgttgtccgggggcgcctcgttcttcttgcccagaatctttagaaggctcttggacatgtagtagggccggtccagggagccgttgttccgctccaggtcttccactgagccgcaacagagaccggttagagcggaccctggggccaggaaatcggggactgggaggcaagctgcctgcgggatttggaatccaagctgcaccaccacccttacccccgggcaggttatgtaatctcagtttcctcctgtgaagtggggtcgggaatattatgttgcatagagcgatgataagaattagcggaaaaaatgcatgtcagtcgcttaggaggagactggcaaaccctgaatggatgcatgctgtagagtaagaaaatcccctgccgctacagccacctgctgggaagtctctctaatggctcttttttttttttaatcttttttctttgttttgagacggagtcttgctgtcgcccaagctgaagtgcagtagcgcaatctcggctcgctgcaacctccgcctcccgagttcaagcgattctcctgcttcagcctcccaagtggctgggattacaggcgcccgccaccgcgcccagctaattttttgtatttttagtagagaggggtttcaccatgtgggccaggctggtctcgaactcctgacctcagggtgatctgcccacctcggtcccccaaagtgctggcatgacaggcgtgagccaccatgcctggcctctaatggctaacttctacccgagatttcttagggaagatagcagagacctctccatcagaatgctccttctttggagagcctaccggcctgggggctcactctcttccttcttccctaaacgcctggcctcaggatgtcacaagaagctccctctggttcgtttagctcacaaaggcattgtttctagaagcaccaaatctccaaaaaaaaaaaaaaaatgcttgaacggctcagtactttaaggttggggacaggtggctgggggtgtcactcacggaagcagaggaagagcgtgtccacacacatgccgaaaacgctgaagaagccgctggcgatgacataggcccccaggatggaggtctggaagacatgacccgttggggttattgggttcctctggggagttgggggtggagcagcagagaggggagtcactcaccatgatgggcagccagtaatagttgaggtgggggctcttaaagtctttacccagccccgggatgcgaccggagaaaaaaaagaaggacaggacccctgtggaataattctgggggttagtgctgcacctctgaggccacctcttcagctgcccagcacccctaccctctgtccccacagcttctggtcccttacccacgcctccgaccaccagcagcttcccaaagaacagcagcaggtctgtgactttgtccaggacgaccaccctgtgccagaagttagggcaggttgagggtgagaggcctggcaatgctgagagtgaaattggcttcgtaatttgtggggactggtgcaaaatgaaaattgttcacgtttcaagatggcaagagcagagcactaaactaagtctagggcccgactgagcacagcacacccacgaagccagccttgggtgggagatcagaggagggagccacaaagcggggggggagcagcctaacctgacaatgtttcgcatgagtagcatgaacgcatttttggctgagacacagaaattcttcccgtagatggcgatctgagggaggtggaaaggtcagagttaccaaggcgagctgcctggaccaggatgggggtgtctagaccaaagggcaccagaacaaagggttgcttgcagtgtagctcaccatgatgtatgcattgcggtttaggaacttgataaatttttccagacaccagaggcagcacttgaaacagcacatgatgcagcgggctacagggttctgcactcctgggagcgaggaaggctcatgtttggtcactgcccctccctaatggccttccccagctcctgactcctactccgactccagactcacctctgagcttgtggtcaatatactccaagatgacccgggctatctgcacaagggtcaggatgagggctccaaatgccaatgacccagtgtggtaactgcagagggtgttatgcagtcagagacagctccaggacccctggggcccccgtgcctacaatgaccaggcccctgccccatccttaccggagtgtgcggatgaaggcagagattaaggggaaggtagggatgtcctggggcttgtggaaggcccagtagaaggaggcaaaggctccagcgaggacgcattggcccagggccagtacccagttaagggtccagaagagccccaggaccccatagatttgcagattgaagacagaacgttggattaggcctttggatgagtagccctggaagacgcacatcagccctgggcacgaggagttcacaaggtgggcctgggagggtagacggggatagagtaggctcaggcatcgggggcctcagtatggagcctgggcgtcccattcccagtagctcctgcccctcccagagttgacaggtgggaagtagcttctctggactgcgggaatcaagttctgtcggagagttccatctccaggctcaaactcagtttggtctgcctatagcataagcataatcagctccctcagtctcaatcagaggggaaggcactcactcagcattcccattccagagcagcctctgcaacgtctaccaaaaccctttccggcaaattgaacaggctgggtatttgatgatattaaggaattattgttaattttgtgagatgtgataatgatatagtggctatgcttttaaacagttcttatctgttgagatccatctcaatgcatgtacaggtgaaatggcatgatgtccagaatttgccttaaaagtctccagaaaaaaaaatttatgaggcgggtgcagtggcttatgcctgtaatctcagcactttgggaggccgaggtgggcggatcgcctgaggtcaggagttcaagactagcttggccaacatggtgaaatcccatctctactgaaaatacaaaaaattagccgggcgtggtggcagacgcctattatcccagctattcaggaggctgaggcaggataattgcttgaacccaggaggcagaggttgcagtgggccgagatcgcgccactgcactccagcctgggagacaagagcaaaactccatctcaaaaaaaaaaaaaattataggtgaggatatagatgaaataagaatagcaaaaagttgagggttgtggaatctgggtacagggaactcactgtgctatcatctctacttttgcatatgtttaaaaattcccataataaaaagtaaaaagtcacaaattaaaaagcaaccctttctagcaaatataaccaaaaaaatttttttttgacacagggtctcgctctgttgcccaggctggagtacagtggctcaatctcagctcactgcaacctctgcctcccgtgttcaagcaatcctcctgcttcaacctcccaagtagctgggactgcaggtgtgtgccaccatgcctggctaatcaaaaaatcttttttttttttttgagatggagtctcactctgtcaccatattggccaggttggtctcgaactctggacctcatgattcacctgcctcggcctcccaaagtgctgggattacaggtgtgagccactgcgcgcggccttctgtcagtctttactgctagatcacaagcaagttgaaaacaacactcacgtcatacccagcacagttgctcatgtgtataatcccaacacttttggaggctgaagcaggcaaattgcttgagcccatttgtttgagaccagcctgggcaacatagtgaaacgccatctcttaaaaaaaaaaattagccgggcatggtggcacttgtttgtagtcccagctacttgggagactgaggtgagaagatcacttgagcctgggagatcaaggcttcagtgagccatgatcgcatcactgcactccagcctgtgtaacagcctttttttcattaaaaaagaaaaaaaaaagaaaaagaaaaagaaccacatcattttgggctttgtatacccagtgcctggcacatagtgggtcctctgtacatgtaaataaacctttttttttttttttttgagacggagtctcgccgcccaggctgcagtgcaatggcgcgatctcagctcactgcaacctccgcctcccgagttcaagcaattctcctgcctcagcctcctgagtagctgggattacaggcacctgctaccatgcctggctaatttttgtacttttagtggagacaggtttttgtcatgttggccaggctggtctcaaactcctgacctcaggtgatctgcccacctcggcctcctaagtgctgggattacaggcatgagccaccgcgcctgccaaacctcccctttttaataggggtggggctaatgcctgcagcacagctcatgttcccagctcagacgaggtgaagatatgacaggtttgagaagagtaaattcccagcagcccagcgccactcccggggaacctcacaggggaattttggaagcagcttctctctcgggtcccccgcagggagtcccacctggctactacctagggctctgtgttccaagggagtaagacttaacaatataatacaattcaacctgttgttgagctcttatcaggtgccaggcattgtactaagcactttatgtgcccaaagtcatttcatcttctcagccaccccagggatgggtattataattatcctcattttacagaggaatggagctgcatgtggtggctcactcctataatcccagtactttgggaggttaagccagaggattgcttgggtacctgactacatcggggcaaccccaggagttcaagaccagcccgggtaacacagcaagaccttgcctctacaaaaagcttaaaattagcctggcgtggtgtcatacgctagtagttccagctgctcaggaggctgaggtgggaagattgcttgagcctgggggatggaggttgcagtgagctgagattgcactgctgcactccagcctgggcaacagagcaagaccctgtctcaaaacaaacaaacaaacaaacaaacaaacaaacaggagtaggctgagactcagagggtgaagtggttgatggtcctcaagtcagagcaatgtcctggggaggggtggagtaagtcctggtatccagggctgtctctcccagcctcagtttccctccccacatgatggatggctcaacaggagtaccaggtattctgggaactggtttcttctagctctgctgggggttgagtgtgtgaccttgcacaagtgtcttgccctctgtggcctcagtcttctctgcacaatgaggaatgtggcccctacagcccctcacccctactagtcccgcctccatgtcccctgcttcctcttaccgtggggttgcatgatgtatttattggcactttctcacagccgggggagctgatgttggatgcccagagcacatactggggttgccccgatgtagccaggtacccagaggggagtcaaggaaagcatgatcacacgaggtctccacaggtcactcgctccttagggacctgttcctaggtgcttgtgcagatcgtttgctgcacagagagggctgaaattcagcctgtgtgcaccctttcaactctgttcaggcacagtgctggtgtgtctgcccagagaaaggggcacctcttccagtgacaccaaggcactctacaaggcaagtattgctttgttttccatcaacccccaggactccaagagtggctggctgcgtgggcagaggatacagagcagtcatggcccagtaggcaatgcagatgaggaggaggacaaaggtgaccagtgggtagaacatggtagacatcatctgtcccacagccctgcagggagacaaagctgttaaccggcaccgccccagctgtccatcttctcaaggggctgaccccggccgggcgcggtggctcacgcctgtaatcccagcactttgggaggctgaggcgggcggatcacgaggtcaggagatcgagaccatgctggctaacacggtgaaaccccatctctactaaaaatacaaaaaattagccgggcatggtggcgggcgcctgtagtgccagctactccggaggctgaggcaggagaatggcgtgaacccaggaggcggagtttgcagtgagctgacatcgcaccactgcactccagcctgggcgacagagcgagactccgtctcaaaaaaaaaaaggggggggctgaccccgctgccctcactggggcctgccccactcccccagggtgggaccaacagggttagtgacattgtctttcatatctgtgtcctcagggcctggtgcagggctaggcatactgtaggtgctcactggataaacagaactgaataaatcaggctcacaggacccttagaggaaactagggtcacagagaagccacctggggcagcttcgggtggagtaagggaagatcacccccaagcgtgatcccttggcaggtgtgtgtggcagttcctgatcgggagcaagctgctgcccctcctggcccggattcctgccgttccactcagccaccaccactcccaccaacccctctagaaggcctatgtcatattccaggcactcattgaatcctcaagacaaccctagaaggcaggaattattgttacccccattttacagatggggaagcaaagccacagcagtgttcaccactgtgctatattcctcccttctcctctgaggctccctgccacctctctagcaccccctaggtcccctagcactcctgggtccacgctgtcctcaaccccatctccctcccaggcaggccctaacttgctggcctccttcaggagggcgatggcaatacgaatccgctgccgcaggaagatgagcaccagcagcaggatggcttcaagcaccgccaacacgatcactgcagaggatggggcagacagacctaggtcagggccagggctggggccgggcatggcccagggcagtccttgggcagctggtggcttgggggtgggcaggacactcacgggcggccagccaggtctcctgcacgctctggtaggcactgaggttggtggtgaaacccagctgggagatggaggcgcccttgtcccgcagcactcggtactcctcccagcagtagtagatgccatatgccagcacgcccagcactcccaggatcagcaccagcaccaggggcccagccaccaggcgcagaagcaagataaacagtaggctcaagaccagagccacccccagggcactgtaggcagggtgaggacagtgaggttcagccctagcccctcaaatctttccccttacagaggccctccctgcctttccacacaccacccaatgtccccagattaggcctctttcccttataaatcctgttggtcttggaatccattcggagctctggctcctcctcctctgtccaaagcctgtgtttcagacattgggcgagggggtagaggatcagggaggaagaaggcaaggacacaagaggaggggaatctggtgactcacacaagaatccaataccaggactgggcaaaatcttcaaagatcttaacactgatgtctcgggcattgaggctgtcaataagaccgctgttggggagacagagtcagatggggctgtgggtggaaggggtgtggccaggatgtgggggagggaggtgcctacctgatcccctgctgtatggtggtgtcattggtgatccctgggagcgccggtggagtaatgttggtccatggaaagcagcgtcccagagctggaagggagagccgggctgctgggttgggggccaggagctctgcctggagggtctctggccccctcccagtccacagtgcccttaggggagggaagggtgatgggccttgcatccctcagtgggctgcttttgatttcacaaatgggcttctgtcctgtggagcccagtctatcccctgcctcccctccctgtcgtgccttggtttggaccctcctctccgctggcctcaactcttagaacaccctgtcacccttccatccaccctccacccgagtggagtgccagggagaccgtggcactgcctggacttcatcactccagggttctgggtccctttgtgactcagacatctccagaggctctgccccagagacagcatccacactccctggccaggcttccaggctctcctgtccaaatccagcccatgttcccttctaatctgtacctttgctcttactgtgcctctctctcagggctctctttccaccagaaatcccatccatgactccctgttcaaatccagctccatctcacctcctccaggaagccttctgaccttatccccacctcctttggcaactgttatgtgcctacagagccacttactgccatccttgcaacaactttgccaggcagccttgctttgtcatttatttatctatttatttatttatttacttatttttgagtcaaggtcttgctctgtcacccaggctagagtgcagctgcatgatcatagcttactgcaacattgaacttctgggctcaagcgatcctccccacttagcctcccaagcaactgggactatagatgtgcaccaccacacttggctaatttttaaattttttgtacagatggggttttgctgtgttgcccaggctggcctcaaactcctgggctcaagcaatcctcccacctcagccccccaaagtgttgggattacaggtgtgagtcacctcacctagcttatttattttttagaggcagggtttctcactctattgcccaggctggagtgcagtggcacaatcatagctcactgtaacctccaactccaggactcaagtgaccctcccgccttagcctcctgagcagttgggactacaggcgtgagccactgcacctcactgtcatttacattctaaagatgaggaaacaaggttcagagaggttgcatagttgggtcaagaccatagggctggaaagtgctagaatttatattcagatctacttgactttgaagtattcacttgagatactccttactgtacttaaattggtaactggatatctcatcttatgctataaattgtctaattttttttttttgagatggagtctcactgttgcccaggctggagtgcagtggcaccatctcggctcaccgtaaactccgcctctgggctcaagcaattctcctgcttcagcctcccgagtagctgggattttaggtgcccaccaccacacctggctaatttttgtatttttagtagagacggggtttcaccatgttggccagactagtctcgaactcctgaccttgtgatccgcccgcctcggcctcccaaagtgctgggattacaggtgtgagccactgctcccggcctaaaatttttgtttgagacggagtctcgctctgtcagcaaggctagagtacagtggcgcgatcttggctcactgcaaagctcactgcaacctctgccacccgggttcaagcaattctcctgcctcagcctcctgagtagctgggataagaggtgcatgccaccacgcccagctaagttttgtatttttagtagagatagggtttcgccatgttggccaggctggtctcgaactcctgatctcaggtgatctgcctgcctcagcctcccaaagtgctaggattacaagcatgagccaccatgcctggcctaaaaattgttttatattaaaaatgacatttgcaactgggtgtcggggctcatgtctgtaatcccagcactttgagaggctgaggtgggaagattgcttgaatcgaggagttcaagaccagcctgggcaacatagcaagacttcatctcttaaaaaaaaaaaaagacatttgctactggaaggaagagcacactgtaaaagaaaaaaagttcaactgtgatcctaccacccagccacgttcacttataacatttgaacaaatatccttctagccttttccctgtgcatatataaaaatgatatgtgtgcaggctgggcgtggtggctcatgtctgtaatcccagcactttgggaggccaaggtgggtggatcacgaagttaagagttcaagaccagcttggccaagatagtgaaaccccgtctctactaaaaatacaaatttaataaataaatttaataaataaaataaaaataaaaattagccgggcgtggtggcgggcaccatgtgctgtaattccagctactcgggaggctgaagcagagaagcgcttgaacccgggaggcgggggttgcagtgagccgagatcacgccactgcactccagcctgggcaacagaggaagactccgtctaaaaaaaaaaaatgtgtgtgtagattcacccatgtatgttttcatgagattttcatacagtctctttgtgaacaactctaatctcttcacctagaatgtagctgaagcagggagcagttgttatccctgcctctgtccccagcacctggcacatagtaggtccccaaaacactgatggtctgactgcaaggccacataacaaagagcaaaatgaagacctgatgctaattccaattttgccaccaacaagctatgtgacttcactctctctgggcctgatttcttcattcaagcaatgaaaacactggactagatgacgtctgaggaaggaatctgtgcttctcacctggagcagaggggaggaggaaactggggcagagttcctgttgcaggcttgtgatcaccgtctgtggcaggagtgaaaggacagacacacagacacagagcaggatgaagaagcaggtcccctcaccaccaccatggggctcagcctgtcccacactccccaggagagccaacctggtgatgatctacccaactccccctccctctcgtgcccaccctggcccttctgggcgacagtgatgaggttaggggcaatattcaccatattccagggtacccctggcagacaaaagttcctgttttttgtatagaagacttccccaacagtctgtgagaactcgttttttcccacagtccatgggtcctccgggcaggaggacacacacacctgggtgcagagagaacactaaggggctggaacctgagaccctgggtgagatctggggtagaggcaggtcccaggctctgacctggggtgtggggcactgtaggccgttctcagcaactgagatgatgttgctggacaggatgcagctgaagatgttgaagtacaggagatacggcttatctctgtgggaggggagggaccatgtgcatcagggcctggtcaggtgttgggggaggggagggaccactagggtggcttctcaagaatacagtgggcccagcccagcgtggcccataccagtcacctcccagctcctggccctagctcagctggggaggtagggagatgcctagaagatctctcagagtaagtcaccattgcagcagctgacaaatagctcagagcatgaacttggagctccacaacttcatatcatctttatgatcttgagcaagtcacctgttctcggtcttagttctactccatataaaacagtagtgcctacctcatgagatttcaatgcgcttgtgtgtgtaaagtttactgcctgcctggaacatagtaaatgctatataaatatttgaggttttattatttattggacatctgtatgtgaggactgttggcattgcttctggaattccccttgaatttcaaataaggaaatcaaagctcagagagcttgagtaacttgtccaaggccacacaaccaaaacttggtccagttggggatccaaacaccaatctctgaactgtaaaactcatacacttaacacgactctccactgcctcccatttctggggggactcaagaagctaactgtccagcaatggttcttaacgtggcctggagttgtcagattcagggaggctgaggtggggtggggacagcagggaaaggctgtggaagagcacggacaggtctggagcctgagttgggggggtgtctcctgcccaccctacctcgcctcgctcctgcactcctcttctcgcctttgtactcacttgttctcccccatgccacagtaggccccagtagagttcctggggtagaggacttgccgggggtctccatacaaccaggctgcagacagaggcacagatgagtcattggagggcagggacttagtggggcagttatgggaatggtccctccctgggttcctgtccctcacccactgccctggctctgagcagctggaaactcacccacaatccccaccacgatgtaacctagaatgaagagcaggaagaggacgcagcagatgacatctgtgcagcttctgagagagaaacgaaacgggaggctgagctaaggagacttggggaggtagggcttatggtctggaggggttaagggttagagagttgggtgatgctgcagcatgggcatcagtaggctttatttttatttttttattgcttttacttttttattttgagacagggtctcactctgtcacacagactggagtgcagtggtgcaatcttggctcactgcagcctctgcctcctgggttcaagcaattctcctgccttagcctcccgagtagctgggattacaggcgcgtgccactactgcccggctaattttttttaaatattttatttagaaaacctagccaggcacagtggctcacgactgtaatactagctacttgggaggctgaggcagggcaatcccttgaggccaggagtttgagaccagcctgggcaacatagtgagatcccatctcaaagaaattagcctggtgtgatggtgcatgcctgtagtcccagctactcggaaggctagggcaggaggatcacttgagcacaggagttcgagcctgcagtgaacccccatctccaaaacacaaaaagaaagaaaacctttttctgggtgggtaaactttcttctgaagtaaaagacagaaaagcacacaactcgcaagggctcagctgggtgagttctctcgcttgtgaagccggcacttaagtcaagaaacagaacatccccccagaactgggaagccctcgatgcctgctccagacacaacaatccccccagggcaccacccatctggggcaggagtttctctttttcacaagtttcctactaatattttagcaaatacaaagcaaatactggattccacactgcacccaccacccccgccagcccccggagcagtgcccagagctcacctgttcttgatggggcctcgaaaggaggggtcgtatttgactggcttccctgagggacatgagaagaggtgtggaggatgagtctctctctgcatatcttgtcctgctgagtcctcctagccccaggatcctacccaggcctcaggtgtttggagggagatgggctagggcaggactggcaggaggggaaaactggggagcaggaaaggtaggatccaggcctggtcagcagctcagcagctccctgggagctccacccaggctgccatggggaggggaaggaaggcctttatagtttccggctcacatctcaaggcagtcagtctgggaaatggccttggtcccctgccctaccctggcacggttctcctgagtctccctttagctgggatgtgggactcccagtggctctcactccctcattctcatccctgcctcctccctaatccctccccagggaccacacagacccacagcccctcagggaggtcatggcctcttcccctatctgccccaggccctaccttaccctctggttcaaggctatggggaaagaaactggagacaaaggtgtcaaccccagcagggcctggggagggaagcggccctgtacatcctcactctggtgggacctcagtcccctggccacagtgtgctccgggctctgggccagcagtcagagtgacacctgagcccagccatagagattgcaggcacgttgagttcctggtcctccctgagtacacacacagggaggaggagggctgggcagtcagggttccttgtgggcactgaggagggagagccgagggctgggcaggagtctgggaaggagcgggtggggtccactttccccaggtgcgctggactctgtccctccatggctcatggacaatgattgacctgaagccgctccaggaagtctactcgggagtcctcactgcctgctcccctatggccctaagggactcaagcctctcctcgagaaggtccctcataggggttccttccccttcagaccagaagaccaggggggcctccgcaggtgagtccccagccttcactgctcgtggggatctggaggccagtccccagctccctctctcctcagaaccccagccccttttccttgcagattctggaaacaggctccctgctgtttctcccctcaggcctcacccttcacaggaaccccaggggccctgtccctattcctcagagtaccccaagaccagctcctgctcctagctcctcacagagacccctaggcaggaccccagccccctttccacaaagaccctcagccccaactcctcacagggacccccagcagaacccactccctctgccacttctcccagagaccctggcaggcagaggccagcccactcagggtcccctcactcctcaagggagccggcaggccacaagcagctttcgccctcagagacccagactccaggctgaacctcctcctccttacagggaccctggcctcactggttgcaggctctgcagcacaggacactcccagcatccagccctattctgctcagggccccaacctgccaccttccatctcggctttgtttcctagggccctgcccttagggacccagagtccaggcctgaaatacccccctcctcccaaggacctcagccccaactcttcagaggcacccagcttcactccccatgggctccccagcaacagccccagcccccgggccccatcctcctcccaggaccctgactccctccctccatggctcccggttcccgggccctcccctcagggacacagtactctccttagttcctctccctggagccagccccagacaccattcccaaagtacccgtcctcccctccctccacagggtcccgggcctcgccccagtctcaccgtaggcctcgtcatcctcgtcccgctgctttccccccatggctcagtctccggagtgattggagccctggagacctggcgtctcacctgctgcccgccccgccctcccacacgtcacagccccacccccgcctgtggtccccgacacactctagttccttcttctcaactttgtgcccagcgggctggggagctggagcctgggacgggggctcagggctatttcctgggggcactacggaccacagtgaacgacctggcatgctctgataagaaaacgctttataatctcgcaaactaccttaactgccgtacactcccaacacgctcccgccaaagattaaagtgtggaaattggacctgttttttcctttttgagatggagtttcgctcttgttgcccaggctggtgtgcagtgactcaatcttggctcactgcaacctccgcctcctggcttcaagcggttctcctgcctcagcctctggagtagccaggattacaggtgcctgccaccacgcccagcaaattttttctattttgaaagatggggtttcaccaagttggccaggctggtcttgaactcctgatctcaggtgattcgcctgccttggcctcccaaagtgctgggattataggtgtcagccaccgtgcctgtgaaactggatcttcatagtggccccccacctccctgccccgcactgggcggccatcacaccagccacacctgtccagcctgcttcccatcctattctggcccttggacccacattccctctagccaagtatgctttctccccaccccaacacaaaaatcgcagtttattaccaaacccaacatttattgagaacaaaaggaaccagttggcatagaggcccgacttcaattcatcaaacttcaactgaggatggggaacacggggggtggccagccctgaagttgccctcccagggaggaaccagctctgggagggaggggctgtcagacctccagggcctggctgggatctctggtcaggaatgtgtgaaagggtggtggggagagaagatggcagcacccccaggcatgggctgcgagcagctggtggcagaggaggcggctgagctgtggccatccatgctggggagagagggtgtggtccgttctcatgtgttgacagggggcagggagccgagctcgggcagcagctcagggtgtgggtccaggcgggccagacggctctgctccagggcaatggcttcggctgagtgcttgcacttctcagagccacattggcaggtgaaatatttgcttttgatgtcccagaagcggtcgccatagtcaaacctgtcagaggaaaacaggagcttgtgggacctggacccagccaccaagagcccaccccgaagaccctgtggatcctgctccctgagagggacccgacacccaacctatcttctccagatgggatctgagccccttgtatgttctatggactttcagcatcagcattgcctggggacttgttagaaatgcagaatcctgggccccatcccaagcctactgattcaaaatctctctgggaggcacaggactgtttccccaagtcctccaggaaatacttatgtacactgaaatctgagaagctctgcactactccatgcctggacaccaggtacatgccagccttcaggtcccaggtttgctgcatctcccaccccctggcagagcccctagagacccctagagtctcaccctagctcctccccagtccggatgtctcgggaactgaagaaggcgatgcgtggaaatcgcaggtcttggtgcagcatgaagacccggacgggaatgatgttggggtcacacaggtggttgatgaagcggctgatgttgccatagtaacgggcatctatgcagtacacctctccatcctggggcagggggatggcactcttcacatctcccccgaccctgcttgccctccccacccactgactccccagtccctcctccccaggtttccatttgctgacttcccagaggctcctgaaagccagccctggggagcagcagggtaaggagggtctcctgctcaccttgttgtctaagtcgaagaggtaagaatcatcctctctcacatcagcctcagcatcagagatcagctccccgacatacctgtgggacaggaatccatggttctgaaggtgagtgtgggctattaggaggtggctccaggccccatctctcttcacaagcctgtggaatctggaatgggcagggctggcaggtgtggggaagggaaggcctggagcagcagtggtgggcaagtgaaagggcagcattccagccttgacagaggaagccttcagtcagcacagagacagacaacaagctctgtggttaaggggattaatgtgtaggggcagttggcctgggtggggaagttcgggtttggacacagagaggtttgtgttccaggagccacccggcaggaatgggcgatatggaacaggagaggggccaggactgcaggaagagccagaggtacaggagtggcaaggaactcaaggcatgattcggggcaagagcacccacacatatctggacaccagagggaggagaggagccagctatctaaggagggtgagcagacatgggagattcagacacacggagaggacgtgggtgggaagtgactgtcaagagacagcttcagcagagtgggaagggcaaaggccgattttggcagggacaggcagtgagtggatggtggggaaactgaggcccagcaggaaggggctgcttgccagagaagttgagagatgacatgatggaaagaaactggatggtctgttgaacaggcaagtatggttagaggactatcttttttaaaggccaaagaatggtcaggcacggtggctcacgcctgtaatcccagcactttgggaggccgaggtgggcggatcatctgaggtcaggagttggagaccagcctggctaacatggtgaaactccgtttctactaaaaatacaaaaaattagccgggtgtggtggtgcgcacctgtaatcccagctacttgggaggctgaggcaggagaatcgcttgaacctgggaggtggagactgcagtgagccaagattgtgccattgcactccagcttgggcaacaagagtgaaactccgtctcaaaaaataaattaaaaaaaaaaaaaaaaaagagccaaaggagactaaagtaagattgagggttgtgggatggcagccaagagaaagggggagattacagatgctgggcagagaaagaactgatggagagggacaggcccctgaggaggtggacagataggtagctgttatcacctccactctacagacaagaaaaataaggctcaaagaggttaagtaacttggccaagaacatccagaagcagagaggggctcaaacccaagtctgtttgtctcccaaactggcactttctccagctaggaagggcgaggagggggtggaggggaaggtagagggtggaggtggaggggagggaagacaagctctgtggtctgggcagagtggaggcaggtgccattctcagctggggggatgggggtcagaggcggctggctgctcagctgcaggaacaggggtcagaggaggctggctggagagtggccagatggagacatgtgactcatcagggcagatggctgagagggaggcctggcagtcagcagtggccatgtatccccttcccaccaggtgttaaggtgctcccggtgacttactcgcagatgaaggtcccctgtgggatggtctgcagggcgcggaccccccagcccatcttggctgttcggtagagctgtagccgcaccctgggggtaggagagatggcgctgttgggtggaggccctggaaaagccccaggggcagggaggaaagggtgaggtggggagagggtgggctgtggagcagggcctcacttgatgccactctgtacgacccggttcttgcagtttctccagcatgagcacgcctggttacactcgaaaatcagcggaggctcaatcttgttaaattcctggagcaatcgcccatcctagggtgcggaggggaggatagtggtttctctgtggggcccacctcagctgcccacccaggaaccccaagactctacagagacagggaagttggggttggggaggtcacacaggctctgagatccgagagcacgaaatgcaggagcatcatccctggtttgcatagacctgggcacacgcccatcgctgtcccagccacatcccaggattcccaggccttgcccagtcctctcagtcacttcccccacagggtaggaggtgagggacatggtcccagggagctggtttattggaggctggctcctctgaaggaggggccgggtgtctgtggccaaggcaaggggcacgcaccttgtcataccagcaccggatgctgagctggccgcacaggcagttggagctagagcagtcgtccacacacgtgcagtgctggggcgaggaggcagaggtcagctcaaccccatgatcggtctgggcccctctactcttgatgccccctgaccccctaaccactgtcctttctttggggtccatgtgttacaacagtgggtggtgatggtcctagggtgacgggtaatcagtatggtggtgtccccagggctactgggagctcatatgataccttgctgtgacctaggaaaaggatccctcccctggtggggatgcgaccccacaccagggctccctttcagccaacccttccttggccaggtgcctttgctggtttgaagcttgtccaactgtacttggcagctctcggtgtccttttggggaggccccgggccccctactcacctgcaggtgggtgatgttgcgatcgatgttcatggtggacgtctcgcagttctctgagatgtacttgtaatcctcagggcagggctccccatccacaccgttgacacagggaatgggcacgttctcatagccccgagccacgtccctgcagaagacgggaagaaggggctgggaagctggaaaagggggtgaggagctactccaggtataaggaagagagttggggaggttcctggggctgggggcaggggagtaaggttgccaggtaagatgcaggacagcgagttaacatagaattttagataaacaagaaatagctttttagtatgtcccaaaaattacacaggacattctcacactaaaaaagtatgcatctgtgcatctgaaattccagtttaactgggtgtcttctatttttatttgctgtatctggcaaccctagtggggagggggcctgtgggtggttctggggattcagtggtgcatggggaggggttggggaatgttgtgaggatgcaatggagcctggggagggtatgggtggggaggaggtggtcttgggtgcagagaggggcccagggctcaccggcagatgatcttctctgtgcggatggcccgatttcccaccccaagtcggagcttgcggttgagttgaagcgcaaaccacacgtcggagcgctcgggagtcaggtcccatgctgtgtccccctctttgttccgcagctcagggttggccccacgtgacaggaataacctgaagaggggacaggatgcccaatgcagggtctgaggctgcaagaagtgggggcaggggcatcaagggcggggcaggggctcacagcacgcagtcatggtagctctcccgagctgcgatgtgcaggggggtgtccccatggtagttgacagcatggaggtcacagcgcgcattcagaaggacttcggcgatggcggcgctgcccgtgaaggaggcccagtgcaggcagatgttctcctcctgtggaggtaggaggggaacagatgaggtgcaggcagctgggcccttgaatccagcctccaccttgctcaggggcctggggctgccctacctcaaccaaacgctcactcacgttgtcagtgagggtgacgtcggcgccccgcgtcagtagcatgcggatcacctcgatgtgcttgtgctctgcagcccagatgatgggcgtccaccccccactgtcctgtgggtgggaagggagtgagggtgggggcagctggccctgctcaccaaagcagcaaatggtcaagattggctgtgtgtgtgaatcccagctccaccattcacaagctgtgggaccctgggtaagtcacttaacgtctctgggtcgcagtttcttcatctaaaaaatgggactagtagggtcgggcgcggtggctcatgcctgtaatcccagcactttgggaggccgaggcgggcggatcacgaggtcaggagatggaggccattgtggccaacacggtgaaaccctgtctctactaaaaaatagaaaaaattagctgggcgtggtggcaggcgcctgtagtcccagctactagggaggctgaggcagaatggcgtgaacccgggaggcggagcttgcagtgagccaagatcgtgccactgcactccagcctgggcgacagagcaagactccgtctcaaaaaacaaacaaacaaaaatgggactagtagcgtctaccatctgatgccagagagaaaataaagtaattgttctctttccaaaaaatacagccaggagctggtcatggaggtgcatgcctgtagtcccagctactcatgtgactgagatgggagggttgcttgagcccaggatttcgaggctgcagagagctatgactgtctgtgaactgctactgtacttcagcctgggtgacatagcaagaccctgtctcttaaaagaaaaaacgaacaaaaatttcctaagtctgcccactcaaaagtcctagaagcagcgacaacccaataacaataaacactcctaggaacatagattgtattctctaaaaaatgcttctggccgggcgctgtggctcacgaggtcaggagttcaagatcagcctggccaatatggtgaaaccccgtctctactaaaaatacaaaaattagccgggcatggtggtgggcgcctgtaatcccagctactcgggaggctgaggcaggagaatggcgtgaacctgggaggcggagcttgcagtaagctgtgatcacgccattgcactccagcctgggcaacagagtgagactccgtctcaaaaaaaaagaaaaaagtttcccataaaggaagcagagtttcttagagaaatggtggattctgagttgggggcaggaaatgtgctgaaaggtcaggaggctctcaaaggccactgggccactgggtcatgtcacagccacagaggcctcttaaaggggcttcttctggacaatgatggaataattcaaagactgagaagaatgccaataaatgactaaaacacatccaatgtatgacaacccaagagttaataaaaagcctcactggacactttcagagattaagacaggaactgattattctgaaacttgataaagagaaagaaacgagaaagaaaagaatgaagagaaatacaaatgaggaagaagaaagcaatgaggacagacacgagcagtgtgaggtcagatgtaggaaaggcggcccaaagcctgaggccaagccaaggaacccaggcaccagggacccagaggggctgggctgggtgggccgctgacctgggcattgacgtccacctgtcctgtgctcagcagcaggctgaccatctccaagttcccgattttggctgcgtggtggaggcaggtggaaccgtcctcctcctgagggagacacgggcaaatgagcctttgggctggcaccccaaacctggtccctgactccgggggccacgccctgctgcctgcgcgcacaccttgctatagacacagccaccacgctgcaccatgtaacgggctacctccaggtggttgttcaccacggcctccatcagtggcgtccgctgctgtttgtccactgcatttatgttggctccagcctgtgagggggcaggagggctggcaccagggaggcatggggcaggggaggggcctaagggcctggtgaatgaggcatggggccgggcccgtgctgacctgcagcagcacatggcagatctccacggagcccttctgggcggctgcatgcaggggcgtgcgcttgctctgctggtcgctctggaagttggggtccaggttgtccactgcggggagagcccgccacaccgggagagggagggacaagtggtaagcaagctagggggcaggtggcacttctttcaggaaggcttctcagggccccaagctggatcagggcccctcctggcattctccgagcttgcctccaccacagcatttatcagaataaggagtcaaaggcatcagctctgcctgaattcaaaccctgccttgcttctcagtaccactgtgcactgtgcaaggtccctaacctctctgtgcaagccaaggctaacaggtataagcactcagaacaggacccagcacctatgagtcaccacatccccatcgttatgggttacatgtgtcttttccccaccacactaagtccttcagggcaaggactgtgtccttcacgactgtactcctggccctgtacccagtgcctggtatatacatgaagcttggtcaaggtctgctgaaggaatgggtggcactcacacagcatcaggatcaccttctgcagctcgccctgcttcacggacaggtacaactgccgagggtggaaacggagcttcttccgcctgccaagggagcacgggagcggggagagaaggggagctcctcagattccagcatcagcctcgacaccactcctctggcctcagccccagttgctgtgcctgagcaactccccactcacctctctgactcctggatgaccagggccttttccagggcctcccggcctggccccagtggcagccccacggctgaaaggcagcccccattgggcagggtcagggagggccctgagctgtcaatggtgtcagccaggggatcgcagggcgggcgccggggttccccatgccctcgcatccgggcactgtggaagaaggagctcatgtccaggagcaataggggtgggggagggaacagacagtacagaagggggaggccagtacctgggctgagaagtgtctgctctcccggggacatcctgggacaggggtgggggtgcaggagctgcagtgccggccggtggggtcaccccgtcaccccgggggatggtcacctcttgagcttcagaagcatcctccccacagtggggacagaagaccatcccattcagctgagacacacaggccttgtggaagcggtgggccacacggaagtcagggtggcactccaggaaggtgccctgggagcagggaaacaacatggtcaggttactggggccccctctgccacagggcatgctacctgtctgccccactggtcactcaccgccgtgcagaagtagccgcagcccgggcagcagtggtgtttgaccatgcgggcgcggtgggtctcacagagcaccatcagggccacacggctggatggcctcatggtctcccgcttgaggatggcggcattgcagcctgacagctgtgcgcagtgaggatgggtgagaagagagcgtgaggctggggccggggactggacgccctggcacctctcccaccagcccacggccccacctctccgtccacactctcagtggccatgcacttgtgccccgccctctcgctgatgcggtcaatcttgggtgcctccatgcggcagctgcacaggggcaactcctcaaaccctcgctctgtctccagcgaagatgtgtcattggacaccccttggatggaggaaaagaggagctgagggaggctctgcacctcacctactgggacccctggcgggtcctctcactccctccctaccccaccccgccatgccccagaacccctaaagcctggccatggacaccccggctctggcgtggttcccctccttccctttccctcctgccctgaggtcgccccctagtggctccctgtcccggcaattggcaattaccagcgtggttgggggagagggtcccctcgctgggcagctccagggaccccagagggacctccatgtactcactggggcctgaggagcccacaccattcactcctgacacagagacagagagagtgagagtgcgagctcacaggtgcctggacgcgtgggtacatgcaggtggacatgcgagagcgtgtgtgtgcgtgcacacactctggggggccgggcgggggctggagggcacccaaaagcagcagagcctcctcacctcgtggctccttggcccgcggaggctcccgcttgcgccgtttccgagacggcttcacccatgggctgtcttttcgccatttcttcttggccttgcgccggccactggaaccactctgggaagggggaggaggaggagttaggaaccctcacccccaggggcccccccaacaccttcaggaccagacctccagccccatagtctcccactcctctggagatatcagcctccgtctcttaccctatctgactgattccctgactcctcatcttcctcttcttcttcctcttcctcctcctcttcctcttcttcttcttcctcctcttcctcctcctcctcttcacttagttgttcagttagagcttcaacttcagactgggagagaggcagaacagacatatccaacccccaggactcagacaatgaggtgagtaaagaaaaccaccaccaccattgccccccgccactacccacggatggctgctggggataagtgtgggtagcagaggagacaaagggccacataaagagagggtgcatggaatattacacagcagtgaaaaagttacagacagcaatgtgcacagatcttggtaatgtgatattaagttaaaaaacaaaaagcaagtaccagaagataaacatactttgataccccttttatgatgttcataaacaggcaagaccaccaatggttgctaaaaacactagacacaaagctcatgagaaactttatatgaaaggttcaggctgacatcacctgaacccactggtcaatcttatcactaacaagaaaaatgaccagattagatgttccatgcatcctgatgtgatgtggccagaagcacttgcacccactgtcaagtcttcttggcacctgaagctgattccgcctctagatctatcagtttacaagaaatatgggcagagaggatgtgtcaatctccacccaatcagccaactcctaaatgtgaaaaattctgtaggacaactgagctggtttctttgacaaataaatggcaaaaaaaaaaaatctttcttatttatttattgagttttgctcttgttgcccaggctgcattgcaatggtgtgatctcagctcactgcaacctccacctcctggattcaagcaattctcttgcctcagcctcctgagtagctgggattataggcacccgccaccacacccagctaattttcgtatttttattagagatgtgttttcaccatgttggctaggctggtctcaaactcctgacctcaggtgatccacctgcctcccaaagtgctgggattacaggcgtgagccaccacgcctgggccaaaaaatttttttttagaagatgaggaaatcaggccaggtgtggtggctcacgcctgtaatcccagcgctttgggaggccgaggtgggcagatcacgagatcaggagtttgagaccagcctggccaacatagtgaaaccctgcctctactaaaaatacaaaaaattagctgggcatggtggtgggtgcctgtaatcccagctacttgggagactgaggcaggagaattgcttgaactcaggaggtggagcttgcagtgagccaagatcacgccactgcactccagcctgggtgacagtgtgagactccatctcaaaaaacaaaaacaaacaaacaaacaaacacaaagaagatggggaaacctaaatactgagagagacctaagacaaaaaaaaatttttttttttttgagacggagtttcgctcttgttgccgaggctggagtgcaatggtacgatcttggctcactgcaacctccacctcccaggttcaagcgattctcctgcctcagcctcccgagtagctggaattacaggcacgtaccactacgtccagctaattttgtatttttttcagtagagacggggtttctccatgttgatcaggctggtctcgaactcccaacctcacgtgatctgcccgccttggcctcccaaagtattgggattacaggcgtgagccactgtgcctggctgacctaagacaaatgttaatcaaatcaaggtgtgggcctcatttggatcttgacaaaaaccatttgtgagagctgaggaaatgtgaagactgacaggatatttgatggtattaagaaatcggtaagtttttttaggtgtgaaaacagtagtgtaatgatgttgaacgacaaaaagaggccttatatttacaaatctatatggatatatgtttaggtaaaatgatatgaggtctgggatttgctttaaaataacctagtaggtgtgtgtgctgggagatgtacagatgggtcaagatggactgtgtactgataatggctggagctgtgtattgggtacatgggggctccctattctactcttttgattatgcttgcaagttttcatgataaaatgttaaataaaaggcaaaatcagagagactaaacattctactgtgtaggcaaacatataagataaaaccagacaaagagcaacgaaataagcaaataaatgacaatgcaatgcttttgaattttatataaacagcataacgtatgttttaaaaaagtgctttctggtcatttctttttttgttttctttttttaaacagtacatgtctgttaaatggtcatttcattagctgattaaaaaaaaaagaatactaaatcccatgtgcagggtggtggccacctttgtggatgaaacgggcagaatacacattgaaaatgagttacagctgggcgcggtggctcacagctgtaatcccagcactttgggaggccaaggtgggtggatcaactaaggtcaggagttagagaccagcctggccaacacagggaaaccccgtctctactaaaaatacaaaaattagccgggcgtggtggcaggtgcctgtaatcccagctactcgggaggctgaggcaggagaattgctttaaccctggggacagaggttgcagtgagcccagatcgtgatattgcgctccagcctgggcgacagaatgagattccgtctccccccacaaaaaaaaggagttatagacagcatggggcaatgacttagtggatattcagaagataaaaaggacagaaagcagaaaaacagggaacaaggaggactggacagtgagccccagccctgggggagcaccggtggggagggcagaccagctctgtctcaccttgctgtcggagtccacgcgctcatccacagagtaggaatcatagtagagactgaagtcatcacccaccaccgtctcccactcctccagggacccggggtcccctttcgtcagggtcacttctcctgaacgccgggcagaacctaactcctccgactagaaaaagatcagaaaaattgaggccactgacaccctgcgcatttctactgaggatgggatgcagccccacctctgaccctccctcagagcagcccccgaggggtagaggctctgcctctgctgcttaccaggccacctcctgagttcagcttcctccttttggccagatctggaagaagagagagaatggtgtggggcctatcaccgaaaccttcagaacagaccacatcaagccaccgggggtgggggatgggactgacctgaggtcacctttcccagtgagtggacatcatcactcatgcggaaatgctgtatttcagggggccgcttctcagggaccgggggctgtgggccgagagggagcacactgagggtcagagagcacctacagttttgcctgggttagcctggagccccaggcgggggtggggtagtgagccacacctccaaatgccatgtgaggctccagtagccacaaactggcaaccacgggtgctatttcctcagaggaagagtgtcaagcacactaacactcactcatctctgcaaccatgcagagcaggcccttttccattttacagatgagaaaacaaagcttaataaagttaaaagaccttttatatgtggccatatacacagcaggactgtttacaacagctgaggtgcggaagcaactcaagtgccactgacagatgaatggataagcaaaatgtggcatttatacacaatggaataacattcagccataaaaaggaaagatatactttttttaagagataaggtctcattctgttacccaggatggagtgcagtggcatgactatggctcacttcagcctcgaactggactcaagccattctcctgcctcagcttcctgggaagctgggattacaggcacatgtcacaatgcctaactaatgtcttcttaatttttttttttggtagagaagaggtcttgccatgttgcccaggctggtcttgaactcctggtgtcaagtgatcctccccagaaagtacgggattacaggcgtgagtcactgggcctggcctttgaaacattcttttaaacttcttttagagatggggtcttggtatgctgcccaggtgaaaggaaagaaattctgacatggtacaacatagatgaaccttgaggacattatgctaagtgaaataagccagtcacaaaaggataaatactgtatgattacacttagataaagtacttactcaaatttatagagaaagaaaggacagtggtccttgccaggggctagggggtggagggaatggagagttatgttttaatgggtacagagtttcagttttacaagatgagttatggtgactgatgattgcacatgatgaaagtatttaataccattaaattatatacttaaaaatgttttttattttatttttaaatttttagatggagtctcactctgttgcccaagctggagtgcagtggcgcaatctcagttcactgcagcctctacctcccaggttcaagcgtttctctcacctctgcctcctgagtagctggaactacaggcacatgccaccacgcccggctaatttttgttttgtttttttttttgagacagagttttgctcttgttgtccaggctggagtgcaatggcaggatctcggctaactacaacctctgcctcctggattcaagcgattctcctgcctcagcctcccaagtagcggactgttacaggcatgtaccaccatgcccggctaattttgtatttttaatagagatggggtttcaccatgttcgtccggctggtctcgaactcctgacctcaggtgatccacctgccttggcctcccaaagtgctgggattacatgcgtgaggcaccccgcctggcctaatttttgtatttttagtagagacagggtttcactatgttggccaggctggtctcaaactcctgacctcaggtgatcctcccgcctcggcctccaaagtgctgagattacaggcgtgagccactgcgcctggcctaaaattgttttttagatggtaaattttacgtgacactagtcccctcttatccagttcatcagcagtgatggtggcatattgttagaattgtgctattttttttgagtctcgctctgttgcccaggctgaaccgcagtggcgcgatcttggctcactgcaagtgattctcctgcctcagcctctcgactagctgggattacaggcgcacgccaccacacctggctaatttattattattattattattttagttagagacggggtttggacatgtttaccaggctggtctcgaactcctgacctcaagtgattgccggccttggcctctgaaagtgttgagattataggcaagccacgcctggcctactgttaggattacgctattatgttattattgttgttaatctctcactgtacctaatttataaattcaattttccttttcttccctattctttacaaaatgaattgcaactataaaaattaatgtttatcatagtgagaaaggaaaggtagctcatagcaacctgtgctatgtgaagcaggcaaaattgatcaggctcagcgagaagtcagcatggaacggttagggcccatgcctggaggcaactgcttaaaggcattttgtacctgactagggtgctgcttcacccattatcttcatgtgcctaatatctgtgagacaaagaacaatgtatagcagatcaatagcttgttattctaatgtaaactggtaaacaatttaggaactgcctcttcttttcctttgttatttcttcaatcttttaaaaaatttttatctttttttttttctttttgcggctccttccagagcagggctaactcctacgcagtgtgcccagagtcagcctgttttttttcaatatcttcacgtcatccaatcttcttttcctttaaaaacctacttgtgggctggttgtggtggcttgcacctgtaatcccagcactttgcgaggtcaaggcaggaagattgctgaagcccagcagtttgagaccagcctgggcaacatagtgaaactgtcttcaaaaacaaaacaaaacaaacaaaaaaacccctacttataactgctgctaatcagagtgtattttcacggcaacttgaatctttgctcctaaaggctgtcctcaaaacctgaccaaatatactttacttaatgttaagtttgcctcagttttttcctttaggtcaacaataggtatgacccaagaaccctagaacttggtcataaagcttctggtgcccttgtcacttccctcctctattatttctgtggccctcatctcctttcccactgggattcccaggaaaaactttacaaatagagcagtgacagatgagttccccaagggcttgctttgaggtagaaaggaagagtggtttgaaattcccttaccttgtcattatcataagagtaattaagacattaactatataattgactctttaacatcaaactttcaccacccaagaatgtaaactgcaggaagagaggaacctgtctgttggttcacagatcaagcacagcctaatatttgacacacagcagccccttgcttaaatatgtgaatgagtaaatggagtagaagccttaagtgaaactgtaaaagagctcaccaaaggtttatggttgattatcccatctctcccatcccactcacctgtccatttcctggtttggacatggttttgcgggctcggtggaccttgggctgtccctctgggctcgtggtggctggagggggttcagaccctgctgctgcagctccctgggctcctggcatactcagtagcctcatagccaaactctggacagatggaggtgattttcccgcccctgtcattgacatcttggcccggctaggacaggaaccccccttgctgggggaagaggggaatgactttgtggcatggcctagaaaacaagcaagcaaaaggcaagataagaaagaaggcaagagtcagaaatttcccaccaaccccccaggctacccagcctctcacccagcaggatccggcccccacggaggtccccatctccctcaagattctcagattcatccccaatgagtggtgtagcccctacaggggtgtcagccccctcatcaccaacagtgacagtgacagaggctggagatgaggggccagcaggctccagggagtcgggggtggccttgggcagggtttcttcactacgaggggtgtcccccaaagagccatgaactgtagaggaagagaaaaagttcagagctaagggctcaggagatcctgtgtttagggaaggtgacggtccaattggggcccgttttagctgcactcacctctctcggtggctcctctggtttccttctccagcagcagcgcccccatctcagcgggggcctccccctgggaggggagacaagggacaggagggctggtcagcccagtagagagttggggggtccaggatgcctgggccctgggaagagagagtaggctccggggcctacctcttcctctgtggggccccccccttccgcggcctcggctgcccggaggggccgcacgacccctcccccgggcccgcatcaaccccctccctctcggtagaccccgcatctctggggccgagagaagaggagggggagggggcggggcctccgcgccccggccccgccccctcctcccggctgcacgcgccgctccccctttgtcccccaggccgcggggaccccgggcaccaacccctccagcacccgctgccccccagcccggtggacggcccctcgtgcccctcacgcgtgctcctggggccccggcgcccgtcgcccactcaggggcagccggcggctgcacgcgcgcctccgtgcccactccccccacctcccacaccctggtcccctcatccgcccccggtgctggccccctggattgctgcaagtcccgcccgggccccccggccccgttgcacccccggagcattgcacgggcgcgcgcttcccccgggcgcgcgcgcgggcatgcacccgcctctccccctccccttccgcacctcggcggccgccgccgctgcagctcccgccgccgccgccatcgccgcttgcgctgggggccgagccggcgcgcggccgccccgggtcacgtgggcgagggagggagggcgaggaggagccttaaaggagccgctacatgctttttggccattttcccctgagagcggcctcggagatggctgtgactgtcctaagctgggagctgcaagggagaattcctgtcattcctggcctcagttctgcagggaccgagggcgagacacgcctgggcccaggtgtggcgtctctgtccccatctggttttaggtaacaagcggagcttctgaacttctcggctctcggcagcggctgtatttcctctggcctggttgggcttttcccgcctctggttgcttttctgcctttctagtttttgggttaccagatagaaggcttggcctcagttttggcctcgcctttttgctctttctaacgagcacgaaggggcgatagggacgcggaggacacctttattcttggctggttctagcatgctgcttcatgtcccctggagcagcgtgcccttctgaaaacctgtggctaaatgtctcttctgtttatatcaggcgtgttacaccttcacacgcactagggatccaggtaagcccagcggcccgaacgtcattactgactggtgacactgcagtaagtaaaccttttttgccgaacacttcataagcacagtcaggtactccgtgggtcatagcccagcggacaatttaagtataaatgatatacaccaagatagacaatctcgatagctgtatttagggtaccatccctttaggtattacgttttggtcgagtttggaaaagatctgtatgatttcacacgcagtatttgacacaggcaggtggggcacctgaggccaattaaaggccttctgggaactgtagttctctttggttaactattccagagctttctgggaattgtagttttccctgcaccttaatccaaacttagctttttttttttttttttagctttcctgaagacatgacctatttaccccagacaaaatatgaccaaacagactcctgcttacaatttccgtgggcaggttggccacctgtagctcatccctagcactgatcctaagtccctcaaatagagttcatgtgcatccccacgactgccaatcacttgtactgtgaggtacctggctaagtgttgagattgcagaactggtggagggctgggggtggggacttgggggagtccctgaccagaggagctcacttgtcacactcctctcccatgtttagggctgggctccttcaggcaagggatatgcagagttgtgacctctaggtattaagaacgcagcatcacagggagaggctgtctagggcaggatagtcatgtacacgcagttgccagagtgtaaaggaaaaaaaaaagtttttttttgttttttattttgtggaaaacaaaagcagaaaaactaaaaccccaaactccagaaaaaatcctaaaaaatatgttttttcttaaaaaatactgtatgtctctactcctctccctccctcccaacagcccttcttgtgttctttcttttctaagtgccctatcccccccacccccatgactatccattgtttcttgctattgtacccccacttcccaatatctacccaggatgcgcaccccacgttctcttacctggcgtcttactttgttctccctcaaatttcagcaagcctcatactcgcagtctcatttccccagcatgcaagaactgtctcccacttccttttctgggactcagtaatcttttccccttaccactccctcaccccaggtctattctaagcaggagcatgtcctcctgccaaattccctccctgttcccacccaccccccaacccttcttatctcgagaaatgtcagaaccttcccctgggcagccttagccaggaataaaacatttttgtcttccctcattctataggacccttttccctccctccacatatacatgcacttctaagagaaggaaatctttctctgggaccccgtattcccctggcctccaagaacccttttcccagctccagattcttgcactctcaagagcaagtctctccaaggaatcatcttccctctctcaggatgtgtgcatctgctcagcctcccactcttacctttctgccccagaccccccaccccccaattctcctgggccaaagagccctttttccacgcagcccaggggccccagcctcctggcctccacgcctgcgcggctagcggatgaggacgttaatctcggccacactggcctccagcacgttctcggccgtggtcttgccgtgttgctccttgaggtgccgcctaatggcaggcttgtgggcgaagcgcacgtcgcagtaggagcagcggtagggccgcgctcccgagtgcaggttgaggtggtcgtgaagggtggacttctgtgtgaagcacttgccgcagatgccgcacgagtgtgacttgacaccacgatgcacgttcatgtggcggttgaggttgctgctgtggttgaactgcttgccacagcgagggcacatgaagatgaagtgctgcgcccgcatgtggaagaccagcttctccacgccctggaacacttccgggcacttggtgcacttgatgttctttaaggggtttccacctgagaagcccccaggcaggggtccccggctgccccccgcccccaggctgccccccgccccccgggcagccatggccaccgctgctgcttccaccaggcccgaggtggcccccacgctggcccggcctccgggaatcaacagcaggccctccccttctgcatcttccgacaggctatagcaggccttcaccacaccctgcggtggggctacagtgctggggggaacgctgctctgggccagctccccaaggtggccacccacggagcctccaatgcccagaccccctcccaggcctccagggggtttgagccggtgtgccacctccagggccgactccaccttgacgatgcagatgtcagacacgtcctcatcctcatcctcatcctcttcctcggctttcagctccaagtcttcatccagtgggaactccagcttcactggccgcaggagtggagggggtagaggaggtgggggtgggggcttcggggctggctttggggtcctggctggagggaggagggacttggtggcgctgatgctgctcacaaggctagcctcactgaccccatcctctttgaggcctattttgggctcaatgaactggctgagggcattccggcatttctccaccacgtgctccatctgcaggtaggaggcggctgtaaggtagttgacgatgtccctaacagcgaattccaaggcgcccgtgtagcaggagaggagcaagtcggccacgatgcgtgcactgtgcatcagggagacctgcagctccgagctggggttcagcaggaactggtcccgcaggaagggtgagcaggcggccaagatgaccttgtggcctcgaaacttgaggctgtcggccacaatggtcacgtcgcagaaccgctcctctgcccggagctggttcatgttccgtagcgttgcggcctcgtggccgggcagctggaagcgcaggacttccaccccagaggccattgtggcgggggtgggcaaccctggttgggaaggaaaccggtcagagacaaaggtctctggctctccgaagccaaggctccaggaccctcgcccccattcttgcccagccccccggcatccgatctcccggtcttcagatttcttcctcagtttccccaaccctggggaggtgctgtccctctgagaggagggaggcgtggttctcgggggcggggcagcggcgtccacaccccccagcccagcagcccgctaggatggggcgagcccgcgcgcccacggtggaaggacggagaaaaaggggggccagaggcctggggctctggactccaaggtggccccggttgcaggctcttctcaccccgccccctttaccggctgcctcattcctccgccccccccttacacgtttgcacgcgcttttcacgtcctcccccccgccgccagcacgcaccgtgcacgccctgcccccacgctcagagctccgtggcacgcccccccagccccacgaccctgagtgcacgctcctctcacctggcccggttccgcgcgctgtttttttaatcccttattttccccacccccccccggggccggcagcgacccccacacacgggcagggcctgggcagcgcgcaggcgcggggatgcacgggacgcgcgcgcgcgcggggccggctccgcgtgggcgtaaggggggaggggcgggggcggctcgtgccgtgtgttccaggccccgcgcgcgcggcggcggcggcgtcggctaggactcggggaggaggaagaggggagggaattaaaggagcaggatccccccttcccgacccccctttcttcaccagcacccccacgcggttaaagggccggacggccttgcctcctctttggccgggattatttgtccgccagagcggaaatacgttccacacccccctctttctcgctccccctcctctgtacctccaagccccgcggccagtttgcgcgtgcgtgccaagtgccgcgcggaggcccgctcactcgggcccgccccccaatcccggctgcccatggcgctactcgctccgcgtccccgcgccccgcccgcgccgcatcccgcagcgcgcgcgcgcacccgttctctcggctgcgggcgctgccacctgctcccaggggtggtgcgtctccggtccagctgtgccgagcgctgccctgggtgcatccgtggcacctctcagggccccatccgccccgtggctaacagagctgttggtagctattacccacgcctgcctcctctgctgagtgtgctcacagttgctccagacacattcccaggcttttccaactcttgtaaagctagtaaccgcctcagcccttcaggcctgaaatatgatttcactttccacaaagccagacgatccagtgccctcaactttcctccactccatgtcagtcctttaaaatcacacccgccctcccctccattctcaggattgatcccaacttcttgccaaggcagtcgccctccgcttgtgctatcgatgaccttgcccatttcacctttagtatataattaaccctaggactaattttaatgatgtgatttattatgttagtatgattctactctaatcttccaccgctccgtcccccttattcctcacctctcctccagactgacaaggtccagctctaaacaaaacttcccttcaacactgcgcccgggccttctctttctcttgtctctctcagactaagttatagtctccacagcttcagcgacagcacttaggagcgtcttgaaggctggtgccttcccttccacttcctcgtacctacacccacttccccacctatccaagtccgcgtgaagatgccactgtttcctgccaattggatttcttttttacgtccttcaggagactagtgcgttttccttacatttcaattctgatgaagtttcttattatgtgttcaatatctggtttccccattagactataaacttcttggttgcaggaattatgttgtgggttttgttttgcaaataaaaatcatgcaatagggagggtgtggtggctcacgcctgtaatcccagcactgtgggaggccgaggcaggtggatcacctgaggtcaggagttcgagaccagcctggccaacatggtgaaaccctgactctactaaatatacaaaaattagctggacgtggtggcaggtgcctgtaatcccagctactggggaggctgaggcaggagaatcgcttgaacctgggaggtgaaggttgcagtgagcctagattgcgccattgcactccagcctgggcgacagagcaagactccttctcaaaacaaaacaccaaaaaaggtcatgcaacaaatgattgttgaagtaattcctctttggctcagccagcatccacccataaaaagtttgttcttgagctgaaactgaattcttgaactcaagggatgctgtttggcaggagggtggaggcagcgtagacagtgtttaggtggtaccttgactttttgcctttttcttttaaattctctgatttgtatgcccgcacccagttccctctgttgaatctaagagtctgttctaaactgctctctttgtatttaggccttgtagatttgaggaagaacacctgattttgtgtcagacgcacctaggcttaaagccacattcctaggagtttctgagcctactctggctcagaaggctgccagattcgcaaatcattaaaaaaataaaataaaagccctattcctgtaccaaatgaggcccactgggcaagttacttaattctctgaatcacagtgtccttatctttgtctcccccgcccatccttagctcatctgaaagcatttttatcttgaaggccctgatctctcacagggctaatgtgaggtttaaatgagcctggcatgcagtagttgctgagtaaacaatagctctgttctccttttcctaatctgggaaacggactatgaaattttcaaaagaattttattttattttaattaattaattaatttatttagctggagttttgctcttgtcacccaggctggagtgcaatagcacgatcttggctcactgcaacctccgcttcccaggttcaagtgattctcctgcctcaacctcccaagtagctgggattacaggtgcccgccaccatgcctagctaattttcgcatttttagtagagacggggtttcaccatgttggccaggctggtctcgaactcctgacctcgggtgatccaccttgctcagcctcccacagtgttgggattacaggcgtgagccactgcgcctgacccaaaagaactttaaaaattctgtttttctatctcatctcttcttttccgcattgccaaacttctcagaagaatagttcacattccagtgagagcagaaatacaaaaagctgtcaagttaagaattagagtttgtaaaattttgtttcttgtccctttcttgctacttttcctttctaggaatgtagatgggacagggggcctaatctcagcccatggctcaagacaggtagtccttggtggcaggtggagttgacagccaatgaatccttcaagtgtccagcccacccagttacaactctgcgtaaaaacaagcagaggtgcacaaactcttttccatgtagtctggtggagagatgatgtggagccatttcccatgcatcccatccagggggtttacaatcatctagatccttgtcccttcttccccaacttctgccagtataaaaccaggggctttcctgtccttagcttgcagtaccaaatgccttggtgtggtgtcaagaacagataaatttaggagatacttttaggatttttgggtcaggctcaatggttcattcctgtaatcccagcactttgggaggccgaggcaggaggatcccttgagcccagcagtttgagaccagtctgggcaacatagcaagaccccatctctacaaataataagaaaattagcagggcatgatggtgtgtatgtgcttgggatcccagttacatgagaggctgaggtgggaggactgcttaagcccaggcagttgaggctgcagtgaaccatgatagtgccactgtactccagcctgggcaacagaatgagaccctgtcttttaaaaaaaaattaggattcttagtgagctttagaaataaaatctgggctgggcactgtggcttatgcctgtaatcccagcactttgggaagctgaggtgggaggatcacttaaggccgggagtttgagaccagcctgggcaacaaagcgagacacctgtctcaaaaataataataaataaaagtaaatacattttttaaaggaaataaaatttgactagggatgcaaggaataactaggagacaaaaggtccaggttccagtccatcttgaagtcatcaaggctccccaggtttcagtattctctttaataaaatggagggattactctctgaagtattttccagtcctatgagtccatagcagcttactttgaaaaggggtgtttatgtttgtgggcatctctgagagaagctagctcacagcttagagcactacccttggctactcatagaggtaaggagtggccttgataatccaaaaccgtagcaaacattggacatttgtctaagacattcaaagtattttaggctgtgggcttactttttacaacgatgcttagcacgtactagaataaccatatttcctgagcaatctataggaaaggaagaggtaagtcagcctggacttttaaatccataggctgatgaaactgtcttacattacaacaaaacctccaacttctttctctttctcctttgatctgcactcagctctgccctcagcgcaggaaccctggtaaaaactgcaggatgttttggcaatgttggaaggggcttactgcttggggaaagaagccatgtgaaaacaaagtgcctgcaccactcccatccatctgcaaaaccaccttttctgaactcccatccatcccccttgactgctcctcaatgctggctcctcctccttcttcagagctccttatccctagctcttcggagccctctcccagcctcaacctgcctccagacaaactcttccctccccctcctacctcggagggaatttactccctgcagcccaccacctttgccatcgtccaagtcctccacacacccttgctgactctgcccagatccaggtctatctggggaaatggaggcagattctcccagcaccttgtgaattccagacagaaaaagactcttccacttctcgacaaatattctatcctctgagcctcaccaagtctgctctgctaccctatgtcatccttgctgcttgagcaactgactttcgggcctgtgatacctgcctggatcaggttgtcctccccaggcctgcctgtgtccctgcaaatgacctaatccatatcccaagtttaaaaaaaaaattgttcattttatttttttcatggagtcattcgtgagagcagaaatacaaaaagctgtcaagttaagaattagagtttgtagggccgggtgcagtggctcacacctgtaatcgcagcactttgggaggctgaggtggccggatcatttgaggtcagaagtttgagaacagcctggccaacatggtgaaacctcgtttctactgaaaatgcaaaaaaaattagctgggcgtggtggtgcatgcctgtaatcccagctactcaggaggctgacgcaggagaattgcttgaacctgggaggcagaggttgcagtgagttgagatcacgccactgcactccagcctgggtgacaagagtgaaactctgtcttaaaaaaaaaaaaaaagcaaaataaaagcattagagtttgtaaaattttgtttacaaactcaaaattcaaagttcaaaattcaaaatgtagttttgttcaaaattcaaaatgtgtaagtacaattccaaattcaaattgtaaagttttgttcaaaatttaaaaaatataagagggtacaaggctgggtgtggtggcttacgcctgtaaactcagcacttttgggaagccaagggaagaggatcacttgaaaccagcctgggcaacaaggcaaaacccagtctcagaaaaaaaaaaaatagctgtgggaggtggtgttgcctgtggtcgcagctattcaacaggctgaagtgggaggattgattcagcccagggaggagaaggctgcagtgagccttgttcgcactgctgcactccagcttgggtgatggcgcaagaccctgtcaaaaaaaaaaaaaaaaaaaaaaagtggtttcttttgctcaggctggagtacagtggtgcaaagaaggctcactgcagcctcgaccttcctggactaatttatttatttattttttagacagagtcttgctctgtcgccaggctggggtgcagtggcacaatctcggcttactgcaacctccacctaccaggttcaagtgattctcctgcctcagcctctggagtagctgggactacaggcgtgcgctaccacttctggcttttttttttttttttttttttttgagatggagtttcgcccttgttgcccaggctggagtgcaatggtacaatctcagctcactgcaacctctgcctcccaggttcaagcaattctcctgcctcagcctcctgagtagctaggattacggacgtctgccaccacgcccagctaatgttttgtatttttagtagagatggggtttcaccatgttggccaggctggtcttgaactcctgacctcatgatccgcccacctcagcctcccaaagtgctgggattacaggcatgagccgcagcacccggccattttttttttttttttaattaaaagtggcaagactgggtcttcccgtgttgcccagtcattgatcttgaattcttgggttcaagtgatactcctgccttggcctcccaaagtgttgagactacaggcatgagccaccgtgctcggcccagataaatctttttataaaagttagagtcagtagatacagcaaatttcattgttgtcttattttaagaaattgttggctgggtggggtgactcactcctgtaatcccagcactttgggaggctgaggtgggcggatcacctgaggtcaggagttcgaggccagcctgggccaacatggtgaaacccaatctctactaaaaacacaaaaattagctgggtgtggtgggggtgcctgtagtcccagccacttgggaggctgaggcaggagaattgcttgaacccaggagatggaggttgtaatgagccgagattgcaccactccactccagcctgggtgacagcatgagacttcatctcaaaaaaaaaaaaaagaaaaaaagaaattgtcaaagccatcccaaccttcagcaaccaccaccctaatcagtcagcagctatcgatatcaagataaaatcctccaccagcaaaaatgttacaactcactaaagactcagatgactgttagcattttttagcaatacagtattttaaaattaaggttacatacattgtttttagacgtatgctattgcacactgaatagactacagtacagtgtaaacataacttgtgtgcactgggaaaccaaaaagttgttgatatgactggctttattgaggggatctggaacgaagcccaaaatatctctgaggtatgaccgtgtatacttcatttgcttattgtaatagtttcagtatctatgcagttgtaggttttcccggacagtttagttttgtctgtttgaccatcacacagatgaatcatactgtacatgttctggggctggccttttcactcaacattatggttttgttgacttgtgtagctgtaattcattcattgtcttttaattggatgcttatactagaatttgtttgtatacctatttacagttcttttggatatatacctaggagtggaactgttggattatatggcaattatatgttaaatttttaacgtattattattattatttttttttagacaggatctctgttgaccagactggaatgcagtggtgtgatcttggctcactgcaacctccacctcccaggcttagcctcccgccttagcctcccgagtagctaggactacaggtatgcaccaccatgcctggctaatttttgcatttttgtagaaacagggtttcaccatgttgctcaggctggtctggaactcctgagctcaagggatccgcctgccttggcctcccaaattgttgagattataggcgtgagccatggcatttgctcccccgcccacctctttttttttttttgtagagatgaagtcttgctgtgtttcccaggctggtctcgaactgctaggctcaagcgatcctccagccttagcttcccaaattcctctcagcctgggatcacaggcgtgagccactgtgcccaccctatatgttaaaccttttgaggaactgccaaactgttttccacagcagctgcaccattttatgttcccaccaggagattgtacacaagcttcaatttctccatatccttgccaacagttgttattttctgtttttttttgttttttgtttttttttgagacagcgtctcactctgttgccccggctagagtacagtggtgcgatcttggctcactgcaacctctgcctcccgggttcaagggattctcctgcctcagcctcctgagtagctgggactacagtcacgcgccaccacgcctggctaatttttgtatttatagtagagatggggtttcaccatattggccaggctggtctcgaactcctgaccttgtgatccgcccacctcagcctcccaaagtgctgggattacagacgtgagccaccgcgcctggcttgtttttttttttaaatagacattctagttgatatgaagttgtactcattatagttttattttcatttacttaatgactaatgatgttgagcatcttttcatgtccttgttggccatttgtgtgtcttctctggagaaatatctattcaagttctttgctcatttttttttttttgacaaggtctcactctgttgcccaggctggaatgcacaatcatgactcactgcaggcttgacctccccaggaacaggtgatcctcccacctcagcctccagagtagctaggactacaggcacacgccaccacacccagctaatttttgttatttgttgtagagacagggttttgccatgttgctcaggcttagaaggctttcaagcacaaaatgtattacattaggataatgtcttgggggtagaaatagaactatgaaaataagaattcagaagaaatagaacaatgtgaaatttctgactgttaaagaagattataatcatgtactttaaaaatgaatcatgagcccagcacggtggcccacgcctgtaatcccagcactttgggaggctgaggcagatgaatcacttgaggtcaggagttcaagaccagcctggccaacatgatgaaacccccatctctactaaaaatacaaaaattagccaggcgtggtggcgcatgcctgtaatcccagctactcgggaggctgaggcaggataatctcttgaacccgggaggcagaggttgcagtgagccgagatcgtgccactgcactccagcctgggtgacagagcaagcttccatcttaaaaataaaataaaaaataaataaataaaatgaattgggctgggtgtggtggctcatgcctgtaatcccagcactttgggagaccaaagcgggtggatcacctgaagtcaggagttcgagaccagcctgagcaacaaggtgaaaccccgtctctactaaaaatacgaaaattagccagacgtggtggcaggcacctgtagtcccagctactcgagaggtggaggcaggagaattgctggaacctgggaggcggaggttgcagtgagccgagatggcgccactgcactccagcctaggagacagagggagactcttgtctcaaaaaataaacaaataaatacataaaaaaaaaaataaaatgaatcatgaagggaatggttaaaaagtgaaataagactttttaaaaaagatccatgtttacaacacactggaatggcattcttttgcaactaaacatttggggaaagttttagatagcagcataaaaacatgcaaggggtacataatttgcaaaattcttttaatgtgagcaaaagggtttgaagattacatgcttcttgaaatcagcatgcacatgagtcatctggagttttaattcggagtctgagtcagtaggtctgggtggggcctgagattctgtgtttctttctttttttttttttctctctcttttttttttgagacagagtctcgctctgttgcccaggctggagtgcagtggcacactgcagcctccgcctcccgggttcaagcaattctcctgcctcagcctcccaagtagctgggactacaggcacatgccaccacgcctggctaatttttgtatttttagtagaaatggggtttcaccatgttggccaagctggtctcgcactcctgacctcaggtgatttgcccgcctcagcctcccaaagtgctgagattacaggcatgagccaccatgtctggccctttttttttttttttttttttccaatttgagaccgggtcactacgttgccaaggctggtctctaactcctgggctcaagcgatccgcccactgcagtctcccaaagtgctgggattacaggcgttgagccaccgtgcctggccagattctgcatttctacaagttcctgctgatgctgatgctgtctgtctgtggaccacagtctgagtagcaagcatccacatattcgtaagagtggagttgctggatgttgaggtctgcacctgttcagcttccctgctaatgctaaactattttctgaagcagttgtacaccagccatgagactgttgcttcttgggaaaaaagatataaaggcttcaaatttaatggatattattcagtgctcctcttacttgagctttctgcagtctgtgacatacttgaccacactgtttgatccactgcttttccctggtttccatgacacccctgtatccaggctcccttccttctataatttcagtctgttctataaaccctcactcctttcctgtcttgaccttttcctctgttgatgcctttggccttctaggcctttatctcattctctctgggtggtaccatgtgctctttagagattggttaccaggccgggcacggtggctcacacctgtaatccgagcactttgggaggctgaggcaggtggatcacctgaggtcaggagttcgagaccagtctggccaacatggtgaaaccctgtctctactgaaaatacaaaaaattaaccagggtgatggtgtgtgcctgtaatcccagctactcaggaggctgaggcaggagaatcgcttgaacctgggaggcagaggctgcagtgagctgagatcatatcactacactccagcctgagtgacagagcgggactccatctcaaaaaagaaaaaaaaaaaaaaagagagattggttaccacattgatgactctgtgatggttaattttatgtgtcaggccaagcgcagtggctcacgcctgtaatcccagcactttaggagggcaaggtgggaggattacttgagcccaggatttcaagaccactctgggtaagatggtgaaaccctgtttccacaaaaaaaaaaaaaaaaaaaaaaaagatgtgtcaatttggcaaggctatggtgcccttgggcactgtatatatacacatttgcattattatttatcttaatgagatagactctcactatgttctccaggctgaacttgaactcccagtctcaagtgattctcctgcctcagcctcctgggtatctgggactacaagcatgccaccatgcctgactgtagtctggatacttcagtgagggcattttgtagataacactgacatcttggctgggcacagtggctcacgccagtaattggagcactttgggaggccaaggtgggcagatcacctgaggtgaggagttcgcgaccagcctggccaacatggtgaaccgctatctctactaaaaatacaaaaattagctgggtgtggtggcaggcacctgtaatcccagctagttgggaggctgaggcacaagaatcatttgaacctggaaggcagaggttacagtgagctgagaccgtgccattgcactccagtctgggcaagtctgggcaacaaaagcgaaactccatctcaaaaaaataaaacgaagcaaagacattgccatctatactcagctgacgttaagtaaaggagtttactcttttttttttgagatggagtctcattctgtcaccctggctggagtgtagtggcgtgatctcggctcactgcaacctccgcctcctgggtgtaagcaattctcccgcctcaggctcccgtgtagctgggactacaggcaccacacccggctaatttttgtatttttagtagagacaggatttcactatgttggccaggctggtcttgaactcatgacctcgtgatctgcccgccttggcctccagaagtgctgggattacaggcatgagccaccgtgcctggcccttttttttttaagacagaatctcgctctgtcacccaggcgcgatcttggctcactgcaacctgcgatccgactccctggttcaagtgattgtcctgcctcagcctcccaagtagctgagattacaggcacatgccaacacgcccagttaagttttgtattcaccgtgtttcactatgttggccaggatggtctcaatctcatgaccttgtgatccgcctgcctcggcctctcaaagtgctgggatttcaggtgtgagccaccacgcccagccaggagattactcttgatattgtggcctaaagagcaaagacttaggtttcccagagaaggaattctgcctcaagactgtcacatagaaatcctgcctgagtggccgggcgcggtggctcactcctgtaatcccagcactttgggaggccgaggtgggcggatcatgaggtcaggagttcgagaccagcctggccaatatggtgaaaccccatctctactaaaaatacaaaaattagctgggcgtagtggtgtatgcctgtagtcccagctacttgggaggctgaggcagaagaatcgcttgaacctaggaggcagaggttgcagtgagccgagatcgtgccactgcactccagcctgggcaacagagtgagactccgtctcaaaaaaaaaaaagaagactatagttaatgaacaagcaatcggccgggcgcggtggttcacgcctgtaatcccagcactgtgggaggccgagacgggtggatcacgaggtcaggagatggagaccatcctggctaacacggtgaaaccccgtctctactaaaaatacaaaaaaattagccaggcgtggtggcaggcgcctgtagtcccagctacttgggaggctgaggcaggagaatggcgtgaacccgggaggcggagcttgcagtgagccaagatcacaccactgcactccagcctgggcgacagagcaagactccatcacaacaacaacaacaacaacaaaaacaatgaacaagcagtcatggtgcaatgtgataagacacccaggtgttctgagagtcagaggagggctcaggggccccgtggtctatgcctcaacgttggtgctggctttcccttcctcatttctgtgcttgcttttagcccctgttgtcttgccaggactctaaatgtctcttaactggtcttccagcccctacatactgattccagaataatatttctgaaatgcaaatcaaatcatatcacttccttatctaaaattccatatagcaaatcgccttacaagctgtaaatgctgtttcttccataaggcattctctccttcctccctggtctagtgtcattgtggccttccttccctccccagccctgaaaggtcctgaacttgcagttcctttaatgcgctctggggtttcattgctcacctggatgcttgcatctcttccttgtcaggtaaacactcatcttttaaggctatctcaagttcattgatgaaacctttctgatcttctagagagacctaatattcccctgtttgtgtccctgtgaactttatatggactcctatctcagcttgtatcagtcaggatggctacatcatgctgcagtaacaaacaaccctggaatctcagtagcttaacacaacagttttatttctcactattgctctctgttgggtcagtaggagtgttagagtctctgatcatcatagtcactcaggcatccagatcaaaggaggctccatcaaaagagggtgctggagtgtcttgtgttacattggcagttaaatacttgtgcctgacagtaacaacacatgtgacttctgctcttatttcactggccaaagcaagccagttaggcctcttgcagtggcctaacttcaggagggctgaggaattccatcctatcatgtgcctggaaggcagaaaacgggaaaattcatgaagagcctcaatggctgcctcaactcggtgtagcgctgactggctcacatatctctctcccactggacagtgggggaaccaaacgtgtcacagcgttcctaccctttagcagtttgtgctccaggaatgtggagagaccagtatatggatggattataactctgtgttaatgttacagtctgggtttgctggcgtggaaggagtttgtggaagaagggcagtagtttatagggagaggaggatggaaagggatgatcttaattttggtgaccctgacagcagagcttgagacaggacttggccgtaggtagttaatttaggtgatcccagaaagcagaagcgaggctatagggagtgtgagatcctgaaggaggaaaggccagtttaagagaatgatgttggccgggtatggtggctcacgcctgtaatcccagcactttgggaggctgaggtgggtggatcacctgaggtcaggagttcgagaccagcctggccaacacgacgaaaccctgtctctactaaaattgcaaaaattagcctggcgtggtggcatgtgcctgtcatcccagctatttgggaggctgaggcaggagaattgcttgaacctgggaggcggaggttgcggtgagcagagattgcaccattgcactccagcctgggcaacagagtgagactccgtctcaaaaaaaaaaaaaaaaaaagagtgatgtcactgttgtgtgcagtggagttcgattcccccaggccctcctgaggagagagctgaatgtctccagacgctttccacctgaaggacaggaggcaggagcatctgtctactgcttcccactctgcaataattgcaggttgactctgggcattagttctctgccctttttttttttttttttgagacagagttttgctccttttgcccaggctggagttgtagtgagctgagatagcgccactgtactccagcctgggtgacagggcgagactccatctcaacaaaaaaaaaaaaaaaaaaaaaggctggctgtggtggctcatgtctgtaatctgagcactttgggaggccgaggcgggtggattacctgagatcatgaatttgagaccagcctggcaaacatggtgaaacctcgtctctactaaaaatacaaaaattagccggcgtgctggtgggcacctgtaatccgagctacttgggaggctgaggcaggagaatcgcttgaacccaggaggcggaggttgcagtgagccaagacggcaccactgcactccagcctgggtgacagagtgagactctgtctcagaaaaaaaaaaaaaaagaaaaaaattatgatacagagaacaatgagatgttttataaatttatagttcaaaagaaacattttattttggtaaaagccaagaagtgaaagataaatagttttgcagccataaaaaaaaaaaattaaatcatgtcctttgcagcaacatggatggagctggaggacagaatcctaaatgaattagcgtaggaacagaaaaccaaatgcctaatgttctcacttataacggaactaaatattgagcacatatggacataaatataggaacaatagacactgaagactactagaaggggagagagggagggagtgtgggttaaaaaattacctaattggttctatgactacctagtgcaatatacccatgtaacaaacctgcacctgtaccccctgtatctaaaataaaagttggaattttaaaaaaaaaaaaaggccaggcgcggtggctcatgcctgtaatcccagcactttgggaggctgaggtaggcggatcacctgaggccaggagttggagaccagcctggccaacatggtgaaaccccgtctctactaaaaatgcaaaaattagctgggcgtggtgtcagccgtttgtaatcccagctacttgggaggctgaggcaggagaattgcttgaacccgggaggcggaggttgcagtgagccgagatcacgccattgcactccagcctgggtgacacaaagagactctatctgaaaaaaagagaaagaaaatgtgctcttatgtaagtgagaaatgttctgaaaaaagaaaaaagagaaatattttaaaatgaaaaatttgagcttttccgtaaaaaaatttttaatgaattcccagcactttgggaggcctaggttggaggattgcttgaggctagttcaagaccagcctggaaaacatagcaagacctcatctctaattaaagtaaacaattaaaaaaaacttagcctggtatgatggcatatgcctgtaatctcagctactcaggaggctgaggtgggaggattgtggaagcccaggagtttgaggctgccgtgagctatgatcaggtctctgcactccagcctgggcaacaaagcaagaccccatctcaaaaaaaaaatattcctcgaggccaggcacagtggctcacacttgtaatcctaacactttgggagactgaggcaggaggatcacttgaagctaggagtttgaggccagtccgggcaacatactgagacccctgtctttacaaaagtaaataaatgaataaattagctgggcatggtgatgcatgcttcttgtcccagcttcttggaaggctgaggtgggaggatcatgtgagcccaggagtttgtggttacagtgagctgtgattgcaccactaaactccagcctgggtgacagtgagaccctgtctttaacttaaaaaaaaaaaaaaatcctggctgggagcggtggctcacgcctgtaattccagcactttgggaggctgaggtgggcggatcacgaggtcaggagttcaagaccagcctggccaagttggtgaaaccccatttttactaaaaatacaaaaaaattagctgggtgtagtggcgggcacctgtaatcccagctactcaggaggcttgaacctgggaggcagaggttgcagtgggccgagattgcatcactgcactccagcctgggtgacagagcaagactctgtctcaaaaaaaaaaaaaaaaaaaaaattcctggaaggaatggttggtgggtggtatatagacatgaacccagaccgtctatgaaccgagaccgtctatgaactgaagctagatgatggatacatacatgaaagttcattttactattctctctactttacaatatgtttgaaattttacaaaataaaacttaatctgcagagagattgtatcagggtctcttgttaatagtccagtagggtatttcttttcttttcttttcttttcttttttttttttttctggagacggagttttgttcttgttgcccaggttggagtgcagtggtgcaatctcagctcacagcaacctctgcctcccaggttcaagcaattctcctgcctcagcctcctgagtaggtgggatgacaagtgcctgccaagacacccggctaatttttgtatttttagtagagacgggatttcaccatgttggtcaggctggtctcaaactcctgacctcaggtgatccacctgccttggccacccaaagtgctgggattacaggcgtgagccactgggcctggccttgaataggtatcatatgtacccagtgaaaactacaaggagtaataaaggggatttggtgaaaattaagttgccttctttacctcccacctcattttccagcccccagttctccccagaggcaactctcctatccagttttttgtaaacttttccagtgaaattatatacacacagagagcatatgtggctactatcctctttccctcctttttttgcataaatggtggcatcccatacatacagttctgaatgtctatctagtttaaaagtgtatattatataacatatatatctggagacattcagctctgtacacacagataagccttaagcttgcagagactgcgtagtattcagttgtccccataccacaatgtgctgtgtctgtcccctattaatggacgtgggagtttccaaacatttcctcttggtaacagtgaatgctaaagcaaatatcctggtaccttttatacctgtagggtagccgatcttctccttttgatggtcctaattctcaaaggtaaccttaaggggagtgtattttgctgttggttctgtggatgacaggtgacaaaacagggtgagtaaggctacgaaatagctaatgaatttgccaagccaaacctgaggttccaggctgtcttaagtcaaagcctgaattcctcataccacactggggctggggccagagacggggcaggaggagctcttctcaggtataacctttcatttgtgttgggcaggaaagcaaggcatgaacgtatgtctttctactgggcaagttccctcttcaccccttggcagcactggaggagtgagggcaggaggattctcccatgtgagccccaggctatccttttgtcaagagggtactggtacccagaactgggaaggggatgaatatctccccactccccaggataaaggaaaacattagagaggaattttcaatgaaagggcagaggaggctagtgaggcccccactgccaccaatgctaagcccagagctggggttggggtggtgaggaccggagccagggcaattcagccataggccacccctccccctggcccatcctcagctgacccctgagcacctgagttgtgtttaccaccctcttacctgggttacccagggcagcttccctgatgggtagcaagaagtgggtgataacatgcaccatgccccccaccagcccaaggacagtggagacctcagagggctgaggtaagagctgcggtgtgggcagatggacaccctggtacaccccaggcctgtgagtctttagaggttgagtttttgtctgaaagagatatggcgcctacaggaggtcagggacaggccttctgtttcttgggaggccctaccccaccccttagttcctcgttccattctcaggaattgtttgtgcaatggatggacaaggacaggaggttcagtgtctaacccagtgtctgggcctgcagggtggcctctgaggcccagggccctggaagagcctgggcatggggaggagccccatggggcagggcaaaaccctttctgaggctctaagggtgatgtatgtggagattcctcaagatcatagttgggcaatcacttcaaagttagtaggcagtgcctgctaggatgggggatggtgtgggtaccgaggaacttagcagaggcctttgtgtggaaatgggtggggtctgacccaatgtaaatatttttattaaaaaagaaatggatgagaaaccaaagccaattctgttgctgacctgaaagatgctatttacttggggtggaaataggatgggggagggcattggcttgaccttacttggatagctcattgtttaaaaaaaaaactcctggatccttcctctggggagcttgagacaagtgcacaagtagctagaaggtgggaaatggcgtggacaggtcttgtaggagtctggaagatgagggatttgagaaggatggaaaagaaggtgttatgggagagggggtgccaagaggaaagagcctaggggagagagggcttggaaatgcaaggggctggggtagacttcagggatgcgcaaggagctcccagcagtcactaaagagaagacgtgaggaagaggcactaccacttggtggctatgagtgtggacccaggagccatgctgcctgggtttgaatcccggctctgctgcttagtacctgtatgaacctggggcagctcacttaacctttgtgtgcctcagttccctcatctgtaaagtgggagtaacaacagaacctgtgtcataagcttgctgtgaggattaagtgagcacctacatttaagacttaaaaatactgtctggcactatgtcctgctaatatgaagtcttcctcccccagaagcagacctggagacaagggttccagtgcagacagtgcattctggaggtgatcgcaagaaacatgggtagtggagtgtgatagagaaggaaggcagtcaatgaagggtgtgttatcaggcaaatttaccattgtgggtgagtggaggtcaatcccactcaggaaccctggagtggtgcagagttatcccatggtccagggtgagggagcccagtatttataccaatcagtcattggttgaaggccttaattctctgtcatttccagctttctgtgcacagatggtgcaggacaccaaaaacaatccttgggtagagacagagatgctgcagctggaagtcagtggagcaccccagtgataaggcccaagggatatggtggggcaaggacagatccactaaaaccaccaagaggcttgcagagcaatgctgaatccccatctaaagtcacacattaaggctgtgaaccaggccaagccagactagttttccaatttgggggttgacctgcagttgccatagaaggttgaggggtggcagatcctaggatgaccgcgaagtccaggcccaagtggccagactggataaggagtagactggccactagagtggggtcggcctctgctatatgccacgtttcctcagaaattttcagctgcaaggtgctgagctctccaggggagaataaggcatcctgagaggccatcagagcatcatttctgatttttaaactctgattagggggcctggcacagtggctcacacctgtaatcccagcactttgggaggcagaggcaggtggatcacctgaggtcaggagtttgagaccagcctgaccagcatggtgaaaccccatctctactaaaaatacaaaaattagctgggcatggtagcacatgcctgtaatcccagctacttgggagtctgaggcaggagaatcccttgaacccaggaggtggaggttgcagtgagccgagatcgtactgcttcactccagcctgggcaacaaagcaagactttgtctcaaaaacaaaaaaccaaaaaaaccaaaagcaaaaatccaactctgactaggagatgaagtacagaattggggtattggttttttctctttggaattgtacccttggaagcagatattagaagcctagaattgataagaagaaatttggacaagatggaagaagctggcaggagaggcatgtctgttttttagatattattcacctgcttccctctacctggagtgaaaacacggttacatttgctgggcttttgaatggtacaagaaatagagaagccaaggtcgccctcatctggtggggtctactgaaaagctaatcgggagtgccgaggggaataaaggtctggcatctttagccccacaggtcaggtcatggtccttccacattcgactgggcctcctggagagctgacagtggactataactgactttttgccaatggaatatgaatggaagagtggggtgggaggcagacttgatggagaccctgtttcaaccatgcagacaaggacaatttccaaaggcatgaaccacagatggaaggaagctggaggcctgaaggaggctgatgagcagctctgccagccagggccacacacgccatctcagccttgtctgcttaccctgagcctcttattttgtttttattttttttttgttgagatggagtcttgctctgtcacccaggctggagtgcagtggcacgatctccgctcactgcaagctccatctcccgggttcacgccattcgcctgcctcagcctcccgagtagctgggactacaggcgccgccaccacacccagctaatttttttttttttgtagttttagtagagacagggtttcaccatgttagccaggatggtctggatctcctgacctcgtgatccgcccgcctcggcctcccaaagtgctgggattacaggcgtaagccaccgcacccggcctctgaggctcttatttatttattttttttgagatggagtctcgctctgtctcccaggctggagtgcagtagcgcgatctcagctcactgcaaactccgcctcccgggttcctgccattctcctgcctcagcctcccgagtagctgggactacaggcgcctgccaccgcgcccggctaattatttgtattttttagtagagacggggtttcaccgtgttagccaggattgtctcgatctcctgaccttgtgatccacccgcctcggcctcccaaagtgctgggattacaggcgtgaaccaccgcgcccggcctctgaggctcttatttgaaagtgcagcaaaattctatcttatttaagttactgtattttagggtctctttattacagaagtttaacgtgtatcctaataaacacacttctctgagtgttgcctttggctctcacattgatttcttgctaggtatatcagttagacatggtttggctttgttataaccaagctagaataacagcagcttaaatggtctgagcataagtggtccaggtcaatcctattagctctacaggattggagagcagggcctctttaattttgtttctttatcatcatccacatgtgacttccattttgtgatctaggtggctgttccagagtccaccattctgtccacattccagctggtgggaagggaagaagttttatacattgaggagtaaacacttctccttaagaacatactctgtgggcccagaaaacttgggagttttattacttaagcaggaagagagaatgaattctgccacactgtgccaagttgatgtagctcaacaaatactgggaaaaactcatgaaagaaaggccctttcttttgaaggcagctgttacatattagtttgatggctttaaaaggcacccaaagtttagtgatttgaatgttcagtcaggttaggcttcattacgttctggtaaccaacaacctagaaatatttgttgccataggagggcttacaaaatatagccatcaatctctcctattctgatgtgcctgcccctttgccgtgtgactttgccattcctcctatcaagaggtaaattctatgcctccagtcttaaatctgggctgaccttgtgatttgctttgaccaatagaatgtggcagaagtgatgttatgtgacttttggggctaggcctcgagagaccttgcagcttatgttttggattcctcagaagttgtcctgagactgccatgctatgagggctagggaggaaggacctgctgtcctactgttaactgaactcagcccctagctgactgccgctgcatggaagatcagcagaagaaccttctggccaatatgagaaagaataaatcatttttaaatttcctacatattgggtgggtactttttttcctgcattagtagaaatgcaatgaattaaaataacaaaggtttattttttggtcatattacttatccactgagagtcagccgagtattgcgctttttttttcttttttgagacagagtctccctatgtcacccaggctgaagtgcagtggtgtgatctcggctcactgcaatctctgcctcccgggttcaagcgattctcctacctcaacctcctgagcagctgggattacaggcgtatgccaccacgcccagctaatttttgtatttttagtagagatggggtttcaccatgttggtcaggctggtctctaactcctgaactcaggtgatccccctgcctcggcctcccaaagtgctgggattacaggtgtgagccactgtgcccggctggtactgtgctttcgatatcacccagggatcttggctggtggagcagccaccatctcagacgttaccatacagaggggaagagcagggtgaagactacattgagcttccatcaggaagtgatacatatcacttgtactcacatcttattggctaaaacaagtggctggggaaatcctatcctaccatgtgattgaaagaagacaaggctacagtatttgtgaacatccttaaataccccccacctttacgatagtttatttctctcttgtaacaatctaagtggctgtgcagggctggtatgacatcaacactgtgtcagacacccaggctcctctgtctgtttgctctgtcatccccagcatgttgccctcatcctcctggtggaagacggatctccgctaggtttatattccagcccatgaaaagaaaaggcacactgcctttttattttagggacataacttggaaatgacatacataagttctactaacatcccattagccagaaccaagtcacctggctacctagctgcaagggaagctaggaaatatggtctttagctgggtgactgtgtgttcccctaaccatctcttactgtggaaggagggagaaaagatacttgaggggcaggggaggcactagcagctctgccacagcagccactttggagtccctaacaccaggatgtcctgattttcatgcacttagccctgtccaaggggagtctcaatttgtgtactcttttttttttttttgagacagagtcttgctcttgtcacccaggctggaatgcagtggcatgatcttggctcactgcaacctctgcctcccgggttcaagtgattctcctgcctcagcctcccgagtagctgggattacaggcccctgccaccacacccggctaattttttgtaattttagtagagacggggtttcaccatgttggccgggctggtctcaaattcctgacctcatgatccacctgcctcagcctcccaaaatgctgggattacaggcgtgagtcactgtgcccggtcttattttttttttttctttttgagatgtagtcttactctgttgcccaggctggagtgcagtggcacaatcttggctcactgcaacctccatcttctaggttcaatcagttctctaaggactcacttataaatcaaaagggtttttacgaacctaaatgatcacttcagagaggtttcatgttcatttttttattggtcttatttatttttaccctacattgttcaaaaaggtattgaaaagacttctgtgggtcagggagactaacacactagcttcaagtttctttgcttcctgcatttcatacaagtgtaggttatgatttaaaggcatatcccagcccccgcaaaagttttattcctttgagtaaccaaccccaaatgtatttactttgccagttgggaatttcatctactagactttccgtaaaaatgttgtaaacatttttcctgtctccaaaactaagtgttgatttcattttttccacctagattatctctagggaaggattgtagggaataaaaaagtattgtcaatcttcctatttatcaagaagttctaaaaaaattagtttcacccccctcggaagtttatcttcaagaagacagaactgttctaggctctcaggaagtaaaacccacttggtacaacccaaaagaacactaaaactttacttaaatgaaatattttgcaatatcttggatggtttgtgggtttgtgtgctttagactattgactattcacacaagagcaaggtgcatgtgtgcacacacgagcccaaatatgtgtttgcctgcgtgtttgtgagcatgcgtgtatggtgcacatgtgcacgcatgggtgggtggagcgtgggggcagtacacaaagcctgtgggggagatctattgaccctatagatatattagcatcagggagacagggcaaaggtttcacccttcagttcagtccccaatccctgcttattatttccctaacagaagaccatcccccttgccactccctggtttttcttctctggcagcaatgaagcagctgctgacccagctctagttttcgggaagtcagatgaccttttccctcccgcggctctctacctctcgccgcccctagggaggacaccatgggcccactgatggttcttttttgcctgctgttcctgtacccaggtaggaggcagggaagggggaacgtcagggtcctgtgtgtgaggttggtgctcccagcttgaattcccatgtgtgaaacagtctcttttgctttccttttctcatctgtgtcttccttctttctccattgctgtctccttgttcccacggctctaggtctggcagactcggctccctcctgccctcagaacgtgaatatctcgggtggcaccttcaccctcagccatggctgggctcctgggagccttctcacctactcctgcccccagggcctgtacccatccccagcatcacggctgtgcaagagcagcggacagtggcagaccccaggagccacccggtctctgtctaaggcggtctgcaaacgtgaggctccctgtgggctttgctcagggtgctacaccaggggccaccccagaacttttgtttaggagttgctcagggtgggacttaacctgactagatggcaaagttgcttttgcagagggcttttcaaaatatccagaaaatgtcaattgccagtagcaaggaattgggaacaggtcttgatggagactgtggggtactaaagccagggatgactttttatgtacaattgactgcctagtagtgaccattcagaacagatgctgaatggtcctggagtcctctagacatctgaggatcccaaggggagtgtctggggaggccacggccctcaggagactgagggaagtggctatttatcaatcagttcgcttagactctgtgaaattggcaatattcaatcagttgccaaaaacagcaatttcacatgttgcaacctaatatttcagtgttttgacagccagttgaccattcccatgcattccagcataaaatcacctgcttaatccccagcccaggtgttatccatccagtcctatattccccacccacttcctctctctccagctgtgcgctgtccagcccctgtctcctttgagaatggcatttataccccacggctggggtcctatcccgtgggtggcaatgtgagcttcgagtgtgaggatggcttcatattgcggggctcgcctgtgcgtcagtgtcgccccaacggcatgtgggatggagaaacagctgtgtgtgataatgggggtgagttctctggctgatgggctacacagggggctggggtctcctggggaaccctggggcccaatgtgcatccaggaagcctctgtggggataggagtctgttgttcagtgtgccataataatattcctggattttggtaaattgaggtctacaggtcacacatcacaagtctgcaagggccaggccccaggcagctggtgctaagcttcagatgtagcataaagcctccacacactctgcctggcttttctaagtgcctcaaagcaagacttcatattcaggccccacagattgttgtagggaagatatgctgggagagagtcaagtactgtgctttaatgccttgcctttaaagccaggtttgggttccaagccctactctgactttgacagactttgggaaggctatttaacctttctagccctcagttttcccatctgtaagacaaggatagtgagtgctgacctgagattgccatctggattaaatgagttgacattagtaagcatatacaacagccctggagtgcggtggctcacgcctgtaatcccagcactttgggaggccaaggggggtggatcacaaggtcaggagtttgagaccagcttggccaacatggtgaaaccccgtctctagtaaaaatacaaaaattagccgggtgcggtggcgcatgcctgtaataccagctattcaggaggctgaggcaggagaatcatttgaaccaggaagtggagattgcagtgagccgagattgcatcattgcactccagcctgagtgacagagtaagactctgtctcaaaaaaaaaaaaaaaaaaaaaaatgccagcctcggtgcctcacgcctataatcccagcactttgggaggctgaggtgggtggatcacctgaggtcaggagattgagaccagcctggtcaacgtggtgaaacctcgtctatactaaaaatacaaaaattagctgggcgtggttaatcccagctactcaggaggctgaggcaggagaatcacttgaacctgggaggcagaggttgcagtgagccgagatcgtgccactgcactccagcctgggtgacagagtgagactctgtctcaaaacaaacaaacaaacaaacaaaaaacaaaaaaaacagcccctggaatctgataaatgccatgtacacttttttttttttttgagacggagtctagctcttgttgcccaggctggagtgcaatggcgcaatctcagctcaccgcaacatctgcctcccgggttcaagtgactctcctgcctcagcctcccaagaagctgggattacaggcatgcgccaccatgcctcggtaattttctattcttagtagggacagggtttctccatgttggccaggctggtctcaaactcctgacctcaggggattctgcccaccttggcctcccaaagtgctgggattacaggcgtgagccacggcatccggccttgtttttgtttctttaagagacaggatctcgctgtgttgccaaggctggcttcaaactcctgagctcaagtgatcttcctacctcagcctcctcagtagctgggaatgcaggcatgtgccaccacgcctggccataagcacttttgtcatagttattgctgcccctgtgaatggtgaggggctctgcttggcagaagtagggctcctaggattccctggagctgcatttgcctgtgggtttgggagcttcttggatcatggttcttagcacatcatacagaagacacggagtccacaagatggcaggaccaccttcacctagtggcccagaccatggatccccactcatgcccttgggttttggcaaatggccatttattctgtaggagggtgaagtagatgcctggtaagactgtgataagtaatgcttgaattattagacgtgactctaacttattttaaaattgaggcataatttacctattgtaaaatgtacaaatcttaactattcagctcaatgatttgttacaatgcatccactcatctaatcaccacccaagacagaatgaggttccctcttgtcccctcccacaaggtaactgctcttctgacctctgtctccatggactaggtaccttgtgcttacatttcctgtaaatggaatcatgcgggatgtggtctgttgcttctggcatcctttgttctatattctgcctgtgagatttatccatgctgttgtgtgtatcagtactttgttcttttttattgctgtgtagtattccattatatgggtatattacaatttatccattcccctcctgatggacatttggattatttccagtttggggccattaggagtaaagctctaggaacattcttttttttttttttttttttattgatcattcttgggtgtttctcacagagggggatttggcagggtcacaggacaatagtggagggaaggtcagcagataaacaagtgaacaaaggtctctggttttcctaggcagaggaccctgcggccttccgcagtgtttgtgtccctgggtacttgagattagggagtggtgatgactcttaaggagcatgctgccttcaagcatctgtttaacaaagcacatcttgcaccgcccttaatccattcaaccctgagtggatacagcacatgtttcagagagcacagggttgggggtaaggtcaccgatcaacaggatcccaaggcagaagaatttttcttagtacagaacaaaatgaaaagtctcccaggtctacctctttctacacagacacggcaaccatccgatttctcaatcttttccccacctttcccccctttctattccacaaaaccgccattgtcatcatggccccttctcaatgagctgttgggcacacctcccagacggggtggtggccgggcagaggggctcctcactttccagtaggcgcggccgggcagaggcgcccctcacctcccggacagggcggctggccgggcggggggctgacccccccacctccctcccggacggggcggctggctgggcggggggctgatccccccacctccctcccggacggggcggctggccgggcggggggctgacccccccacctccctcccggacagagtggctggccgggcaaagtggctcctcacttcccagtaggggcggccgggcagaggcgcccctcacttcccggacggggcggctggccgggctgggggctgacccccccacctccctcccggacggggcggctggccgggcggggggctgacccccccacctccctcccggaccaggtggctgctgggcggaggggctcctcacttctcagacagggcggctgccgggcggaggggctcctcacttctcagatggagcggttgccaggcagagggtctcctcacttctcagacggggcggccgggcagcgacgctcctcacatcccggacggggcggccgggcagaggtgctccccacatctcagacgatgggcggcagggcagagacgctcctcacatcccagacgatgggtggccaggcggagacactcctcacttcccagacggggtggcggccgggcagaggctgcaatctcggcactttgggaggccaaggcaggctgctgggaggtggaggttgtagcgagccgagatcacgccactgcactccagcctgggcatcattgagcactgagtgaacgagactccgtctgcaatcccagcacctcgggaggccgaggctggtggatcactcgcggttaggagctggagaccagcccggccaacacagcgaaaccccgtctccactaacaaaatacgaaaaccagtcaggcgtggcggcgcgcgcctgcaatcgcaggcactcggcaagctgaggcaggagaatcaggcagggaggttgcagtgagccgagatggcagcagtaccgtccagcttcggctcggcatcagagggagaccgtggaaagagagggagagggagaccatggggagagggtgagggagagggagctctaggaacattcttgcatgtgattttggtacatgtatgcacttgcttctcttgagtaaatgatctaaatgtggaattgtcacatcacaggctggcatatgtttagttgtagtagaggctgagaaagtttcacccacgtacatgccagcaaggtaacagagtgccagtcgctctgcatcctctccaacacttggaattacctgttgtttcagtgttagccgttttgatgggtgtgtagggatgcctcactgtggtttatgaaatataaatgttctctgaaggagtggagggaccatcagctgacttcttccctgggtctctgggggctctgggacagacatgggtgcatccctgggttggaactgggaagcttctgctggcaactgaggccgctgaggaggcagagcctgatgggagggggctactcacctctgccttcctttgttcactcgcagctggccactgccccaacccaggcatttcactgggcgcagtgcggacaggcttccgctttggtcatggggacaaggtccgctatcgctgctcctcgaatcttgtgctcacggggtcttcggagcgggagtgccagggcaacggggtctggagtggaacggagcccatctgccgccgtgagtagctgccctgccctcctgagattcctcggcacacccggccactgccccggctgactcctgtgtggctctccccacagaaccctactcttatgacttccctgaggacgtggcccctgccctgggcacttccttctcccacatgcttggggccaccaatcccacccagaagacaaagggtgagtgtttgaggtggggtttctggttgagcagggtgctggatctgggccggagcaagggaggatgcaaccttcctggaggccaggagccttggtgggctcagccactgaaagggagggaggcagagaagctggacctgcttggcgagagcgcaggaaggaggtggggatctgaatcctccccttccacatttctccagaaagcctgggccgtaaaatccaaatccagcgctctggtcatctgaacctctacctgctcctggactgttcgcagagtgtgtcggaaaatgactttctcatcttcaaggagagcgcctccctcatggtggacagggtcaggaatcaggagtctgcctgcagcagaggccttcctgtgctcactatctctctctgtctccttcccctcctcagaaccccactcacagcccacctcctccaagaagtcttctcagattatactcatgccatgtaggaatcatgaattcaatttatacaatcataatttttattccacaagcactgttgggacactgtgctggggctgggggacagcaaagatggaaaggctgaggtcttactttccaggaattcatcatctagaacagtggtctccacagaaaggtagtgagataacccacaggagtgaagcagaaaaatactggtgcccctgtggaataatttaaatcagattaataatttaatatttaataatttccttttaaaacttcaacattttgtgcaggctttaaaatgtgtgtgatagactgggcatggtggctagtgcctgtaatcccaacactttgggaggccgaggcaggtggatcacttgaggtcaggagtttgagaccagcctgaccaacatgatgaaaccctgtctatactaaaaatacaaaattagccacgtgtgatggcgcacgcctgtaacccagctacttgggaggatgaggcaggagaatcgcttggatccgggaggtggaggttgcagtgggctgagatcacgccattgcactccagcctgggcaactagagcaaaactctgtctcaaaaaaataaataaaataaaataaaataaaataaaatatgtgtgatagaagtttggaagccactggtttaagttcctcgccagaactttgttttgtaattgtgcttttcacaatacttcatgtaacattatagatggttttccctcccagctacattttaaagagggcagtttctgtgctctcttgggactcaaaattaagtaactcattgcactgcgaggcggcaacacacaccagttggagcagtgattgagaatcatgtgacacattcagatcccacttccacctcctcctcatggtgtgatgggggaagggggacaaggcaacatacctcaatttccttatccataaaataggggtcatcatgcccctcacagggtggagtgaagagagtctgtcaaagagaaagatgttcaacaaaggtttcttccttagctgctgctgttccttatttttattattattattattattatttttgagatagagtctctgtcacccaggctggagtacagtggtgcgatctcagctcactgcaaactttgcctcctgggttcaagtgattcttctgcctcagcctcctgagtagctgggattataggtgcttgccaccataccaggctaatttttgtatttttagtagagatgggttttgccatgttggtcaggctggtctcgaactcctgacctcaggtgatccacctgcctaaagtgttgggattcaggcatgagccaccgcgcccagcccctagcttcttcctaacagccatttcctagtgtctcccctggtccttgcctctgtcggtctcactccagtttctctgcctcctccagggccctttgtttgctctcttaccatctcccctttggcttcagggccctttacgctgcctctcacttgccccgcacagatcttcagctttgagatcaatgtgagcgttgccattatcacctttgcctcagagcccaaagtcctcatgtctgtcctgaacgacaactcccgggatatgactgaggtgatcagcagcctggaaaatgccaactataaaggtacgggtgtcatcacgtgatggtgatgagagaggagaagatggaccctctcagggcctgcaaacaaattctggatgagttaaaaagagagtgaggcctcttggtggcacctgagtcccacgagtctggggtagtttcaacgtccagggttatggtgggggagtccagctgcccccagctcatagctcattctgagatgctgcaggtccaaagacactgtgcaggtcttcaattccttccagttgccaaaaccacactgtctggtttgcatggctgcacactgccatctccccatgtcattagccacccatacaccatgtaaagtgcctggttggcacttagcaaatggctgaagccactcaaggttttggaaacctcatctttgaatcttgggactttagtgtggtcttggattggggttatgcaatgaacatttcttttttcttcttcttttttttttttttgagatggagtctcgcactgtcacccaggcttgagtgcagtggcacgatcttggctcactgcaacctctgcctccagggttcaggcaattctcctgcctcagcttcccgagtagctgagatttcgggcacctgccaccatgcctggctaattttttatatttttagttgagatggggtttcactatgttggtcaggctggtctcgtgatcctgactttgtgatccgcccacctcagcctcccaaagtgctgggattacaggcgtgaaccaccttgcccggccctatgcaatgaacatttctaaggtggaaaggcttttaaagtttgaacaagcaatgatgccacatctctatctgaatggcaaatgtctgagtttatcaaaacaatcgataaattgcatttccaggccgggtgcagtggctcatgcctgtaatcccagcactttgggaggctgagatgggcggatcacttgaggtcaggaaaccagcttggccaacatggtgaaaccccatctctactaaaaatacaaaaaattagctgggcatggtggctggcacctgtaatcccagctacttgggagactgaggcatgagaatcacttgaactggggaggtggaggttgcagtcagccaagatcacgccactatactctagcctgggtggcagagcgagactctctcaaaaaaaaaaaaaaaaattgcatttccaataattgggggaatagagtgattccctacccctaggtggtaggtgggaagtttctaagagagtccttccttttggcatattccagatcatgaaaatggaactgggactaacacctatgcagccttaaacagtgtctatctcatgatgaacaaccaaatgcgactcctcggcatggaaacgatggcctggcaggaaatccgacatgccatcatccttctgacagatggtgggtatcatggtctctgagtgtgtctggaatagtggaaggggcaccaatatggggtcagaagccctgaattctgattctccctctgccttccactttgggccccagttttgtttttgtttttagagatggggccttgctatgttgcccagctgatctcaaactcctggcttcaagcaatcctcctgcctcagcctcccaaagtgctgggattacaggcatgagccaccacacctggcccagtttcttatttataaaatagggccagtgtggtggcttatgcctgtagtcccagcactttgggaggccaaagcgggtggatcacttgaggttaggagtttgagatcagactggctaacatggtgaaaccccgtctctactaaaaatacaaaaccattagctgggtgtggtggcaggcgcctgtaatcccagctacttgggaggctgaggcaggagaattgcttgaacctgggaggcagaggttgcagtgagccaagatcatgccactgcactccagcctgggtgacagaccaagatcctaccttgtctcaaaataaaataaataaataaatagaattagtgttgatgatgatgaccgtaaccacaatgacagcaatgatgatcatgatggctgtcctcctttccttacacaatttttatggaaagctatttaagttgcctgtgtgaaagtgctctgtgttagctcttgttaccatctgggaggtaacttggagatagatgaggaaacgtggctcttgagcaggaatgtcgaagggcacggatgcaaggaacagtctgtagtggatctggccttgtcatttgcctcttgctattgtccaaattacacagttcctccaggacttagtatataaaatgaggatacccactctacctggggtttcatgagaattaaatgagttaaagtataggaagcacctggcctggtgcctggaatgtagaacatttcagtaaaagtgtgtatatatatatatgtatgtatatatatatatgtatacatacatatatatatatatatatatatatatttatttttttgagacagggtctcactctattgcccaggctggactacagtggtgcgaactcggctcactgcaacctctgcctcccaggctgaagcaattctcgtgcctcagcctccagagtagctgggactacaggcatgtgtcaccatgcctggctaatttttatttttattttttgagatggagtttcactcttgttgcccaggctggagtgcaatggcgcgattttggctcaccgcaacctccgcctcccaggttcaagcgattctcctgcctcctgagtagctgggattacaggcatgtgccaccacacccggctaattttgtatatttagtagaggtgcggtttctccatgttggtcaagctggtctcaaactcccaacctcaggtgatccacctgccttggcctcccaaagtgctgggattacaggcatgagccaccatgcccggccacacctggctaattttttgtggttttagtagagacagggtttcaccatgttgcccaggctggtctggaactcctgagctcaggcaatccgccttcttcggtctcccaaagtgctaggattacaggtgtgagccactatgcccagcctaaaagtatattttgaagctctcacaggcaatgtaaatgttgaggttcccaggctaaatgctttcctactcttccagggcctggggaaatcctgatattacctagaagaattctttattctctttgttctaggaaagtccaatatgggtggctctcccaagacagctgttgaccatatcagagagatcctgaacatcaaccagaagaggaatgactatctgggtgagcccctgccactgccaccacatttgttctgctcctgcagaggtcacgagatcttcagccagggatctcagcatcttagctatggtccagagccacatggttttatttctgcgttgttctgtacaaaggcaactcatgttgaagagcctggggtcaaactactgcccatggtctcaaccttaccttctttttttttttttttttttttaagacagtgtctcactgacactcagagtatattcctggaaagatgtccacccatgccggcccagaagctggtccagaaagtaacgatgtccaccatgccaccatgaagtgcagtggtgcaatcatagcttactgcagcctcaaattcctggtttcaagtgatcccctcaactcagcttcccaaagtggtaggattacaggtatgagccactatgctcagcccgtcttcacaaattttttaaaattaatttttaaattttttttgagacagaatcttgccgtgttgcccaggctggagtgcagtgactcgatctcaactcactgcaacctccacgtcctggcttcaaatgattctcctgcctcagcctccagagtagctgggattacaggtgtgtgccaccatgcccggctcatttttgcatttttaatagagacagagtttcaccatgttggcagtctggtgtcaaacccctggcctcaagtgatccgcctgccttggtctcccaaggtgctgggattacagataggcgtgagccactgtgcctggccaatttttaattttttaattattatttttaatcaacagctttagacagagaaccttggtttcatcttcagtgggctgtggccatgggcagtttcttcatctgcaaaaggggagtagtactaggacccagctcacaagctgacaggggaagatgctcagacaaacactgcctgcctggcatagaaaaatgcccagcatatgttagccatgaccacgaccgtcgtcgttatcatcatcatcatcatcatagcatctcatgtttcaggaaactttccaggaagaagggacctcgattccctctggggaatgtccctggtggttgctctttcagcagcacagctggctaactaaggctttggcagttgcagcttctaaaggaaaaattcctcaggttcagactaaacacaaattgcactgacctttgatcagaaagtaatttcagagagagagatgctcagacagggagggcagctggttttgagccccaacctttcatcttccccttagctcctctcctttccattcacactgccccctcccccatcacctggccctcgggggtaagctgattcctctttaaaactctggcccaaggaagacaaaatttaaagcccactcccttcctccttagcatcactggaccaaggtcaaatgctacaaaaacattttattgaaaataagcaggaaaccaaacgaaaatagtcaaagaaaacgcacaaggcacgatcgttgtctagctccaactgtaactgtttctatctgggccattgccagattgcctcctggctgaagatctcttggtccacctaagcaccttgctttttacacacaacgcggggctctctgagaacaaaaatgggccacaaggggtgcaaaggctgggagaggagtagactctgtggtctgcctgagggcagttctgactggcaccacagtcggaggacaggcgcggcctgttgtgtgggtccagggcctccagtgggaaaacgtggctttaggcccttctcccagatgctaccttttacagaggaagaccagatctgaggtttagtttccatgttgtgttctgagttctttctattcattcagtcatttaaaagtacttaccaaactaccacaaacctgggtggcttagaacacagaatttctttttcttacagttctggaggttagaagtctgaaatcaaggtgttggcagggccgtgcttcctcagaaggctcttgggaagaattctttcctgccttttccggctgccggcagctccaaccttggcttgcggcagcataaacccattctctgcctctgtcttcaactcgccttcttttctgtgtgtgcctctgtgtcattacatgctgttctcttatatagataggagacccactacctgtgtctttgtgtccaaattcctttcttctttttctgttcatttgtttgagacagagtctcgctctgtcacccagaagcccaggctgcagtgcagtggcgggatcccggctcactgtaacctctgcctcctgggttcaggtgattctcgtgcctcagtctcccaagaagctgggattacaggcatgtgccaccatgcccggcaaatttttgtatttttagtagagacatggtctcgccatgttggctaggctggtcttaaactcctggcctcaaggcgatctgcctgccttcgcctcaaaaaaactgccgggattacaggcatgagtcaccaccatgcccagccagttcacttttttttttttttttttttttttttttttttgagatggagtcttgctctgttgcccaggctggagtgcagtggtgcaatctcggctcactgcaacatccgcctcccggttcaagcgattctcctgcctcagcctcctgagtagctgggattacaggtgtgtgccagcatgtctggctaatttttgtatttttagtagagacagggtttcaccatgttggtcaggctggtcttgaattcctgacctcgtgatctgcccgcctcagcctcccagagtgctgggattacaggtgtgagccaccgtgcccggctcacctcttctttttttttttttgagacggggttttgctcttgttgcccaggctggagtgcaatggcgcgatcttggctcaccacaaccaccgcctcctggtgattacaggtgtgagccaccacgcctggctctggcttacctcttcttataaggacctcagtcattggattagagctcaccctaatctagtatgacttaatcttaacttgattacatctgcaaagaccctttttccaaataaagtcacagatactggggattaggactcaaacacatctttctgggggacacaattccaccattacagggaataaacaggataagaaaaccatagaacccagcaggtggtaggtgacacaagctaaggggtgttgccatgttgcccaggctggtctcaaacttctggcttcaagggatcctcccaccttgcctcccaaagtggggatgaaagtttgtctggggcattgcagttttagacaggaagaccagggaaggcctcactgagaaggtgacatttgagccaagacttaaaaaggtacgaaagtgagccatgtggaagtcttggggggaggagtgaactaggcagaggcacagctgggcaaagggcctgaggtgtgaccatgcctatggatttgaggaacttcaaagaggctgtgtgctgcaggagagtgaagggcagggagtggcaggaaatgaaggcagacaggtagcagtggggaggacgcaggggtccagctcatgtaggtcttgattggacacagtgagtttcagatgacagcctcctgtctcatggggtagccccaaagccacaggagtctggtgatttccctcttccccaccagacatctatgccatcggggtgggcaagctggatgtggactggagagaactgaatgagctagggtccaagaaggatggtgagaggcatgccttcattctgcaggacacaaaggctctgcaccaggtctttgaacatatgctgggtgagtgagctttgccctccttggtgtggggaggatggtgaggagcccgccaaaggcccgttttgggaacctggacacagtgcccctcacttgcctccttccccatctgatcctcacacccacagatgtctccaagctcacagacaccatctgcggggtggggaacatgtcagcaaacgcctctgaccaggagaggacaccctggcatgtcactattaaggtaccaggaaggaggggcagggcttggattccagaggtaaaagcggccatgggccagacatactgcaatctctgaaaatcacctgttcccctgcagcccaagagccaagagacctgccggggggccctcatctccgaccaatgggtcctgacagcagctcattgcttccgcgatggcaacgaccactccctgtggagggtcaatgtgggtaaggcaggggatgcaccagcctcctgatcctgaagccacagatcctaccacctcacccagcctctggcccctgcaggagccctggtctagcctaatctagtgtatcatttccaggagaccccaaatcccagtggggcaaagaattccttattgagaaggcggtgatctccccagggtttgatgtctttgccaaaaagaaccagggaatcctggagttctatggtgatgacatagctctgctgaagctggcccagaaagtaaagatgtccacccatgccaggtgcctggagtctgggatgggagggtgccctgcagggaagagtgctctggagatccctggaagagatactggggacaggctggtgtgacccttgctcttctccccaggcccatctgccttccctgcacgatggaggccaatctggctctgcggagacctcaaggcagcacctgtagggaccatggtgagtgctgggacttatggtgcttgagagctggggccggggtttgggggtgataacaaggactaggctgcagtccccaagccaggaacctggattctgggtaaaaggaccagcaccaacatccccttctcttgactatagagaatgaactgctgaacaaacagagtgttcctgctcattttgtcgccttgaatgggagcaaactgaacattaaccttaagatgggagtggaggtgagggtctcaggttggggatgctgggatccccctgtgacagctcccagaatgtctctcttccttctccaggtctggctgctttctctctctgacgcgggtcacccctcctcccaagcctcacaaacctgctaggtgtccctgggtctgcttattctttttttgttgttattgagatggagtcttgctctgtctcccaggctggagtgcagtggcacgacctcagctcactgcaacttctgcctcctgggttcaagcgattctcctacttcagcctcccgagtagctgagattacaggtgcccaccaccacaccagctaatttttgtatttttagtagagacgggatttcgccatgttggccaggatggtcttgaactcctgacctcaagtgatctgcctgcctcaacctcccaaagtgctgagattacaggcgtgagccactgcacccacccgggtctgcttattctacccttctctctggttccacccctgctgcagtggacaagctgtgccgaggttgtctcccaagaaaaaaccatgttccccaacttgacagatgtcagggaggtggtgacagaccagttcctatgcagtgggacccaggaggatgagagtccctgcaagggtgagtccctcaccatgcctggattcccaaggggaaggccacctgtgtctctgtggccagcatgcatgccagaacaccagtccactgccctagatgacactgtctcctgtcaccctttgctggcaggagaatctgggggagcagttttccttgagcggagattcaggttttttcaggtgagaaggtagaagcttgcaggacccaggggttacaggatctcagccttgttggggggatgagggaggcctttgagggatctagggaggttggggcttacagttggggctgtggcagcctcccagccagttctctccttttctccaggtgggtctggtgagctggggtctttacaacccctgccttggctctgctgacaaaaactcccgcaaaagggcccctcgtagcaaggtcccgccgccacgagactttcacatcaatctcttccgcatgcagccctggctgaggcagcacctgggggatgtcctgaattttttacccctctagccatggccactgagccctctgctgccctgccagaatctgccgcccctccatcttctacctctgaatggccacccttagaccctgtgatccatcctctctcctagctgagtaaatccgggtctctaggatgccagaggcagcgcacacaagctgggaaatcctcagggctcctaccagcaggactgcctcgctgccccacctcccgctccttggcctgtccccagattccttccctggttgacttgactcatgcttgtttcactttcacatggaatttcccagttatgaaattaataaaaatcaatggtttccacatctctcagtgcctctatctggaggccaggtagggctggccttgggggagggggaggccagaatgactccaagagctacaggaaggcaggtcagagaccccactggacaaacagtggctggactctgcaccataacacacaatcaacaggggagtgagctggatccttatttctggtccctaagtgggtggtttgggcttactggggaggagctaaggccggagaggaggtactgaaggggagagtcctggacctttggcagcaaagggtgggacttctgcagtttctgtttccttgactggcagctcagcggggccctcccgcttggatgttccgggaaagtgatgtgggtaggacaggcggggcgagccgcaggtgccagaacacagattgtataaaaggctgggggctggtggggagcaggggaagggaatgtgaccaggtctaggtctggagtttcagcttggacactgagccaagcagacaagcaaagcaagccaggacacaccatcctgccccaggcccagcttctctcctgccttccaacgccatggggagcaatctcagcccccaactctgcctgatgccctttatcttgggcctcttgtctggaggtaagcgagggtaaccttcccttcctgctgtctccagcatccctccttggccttttggggccaggcttcatcagcctttctcttcaggtgtgaccaccactccatggtctttggcccagccccagggatcctgctctctggagggggtagagatcaaaggcggctccttccgacttctccaagagggccaggcactggagtacgtgtgtccttctggcttctacccgtaccctgtgcagacacgtacctgcagatctacggggtcctggagcaccctgaagactcaagaccaaaagactgtcaggaaggcagagtgcagaggtttgagggcaatgagtgtgggcagtggcctaaggcagaaacagggcaggcggcagcaaggtcaggactaggatgagactaggcagggtgacaaggtgggctgaccgggagtaggagcagttttagggtggcaggcggaaagggggcaagaaaaagcggagttaacccttactaagcatttaccctgggcttccaggcagccctggaagtcaagagaacactcagaaatggggagggagaagcagtggaaatccatatgggttgaggagtaggtaagatgctgcttctgcgggactgggaatgcgctgtttctcagtgacatggtctccgagaccaggagggatacacctaaggcagcctttccctcttgatgacttctacttgtccccccttctcaaagcaatccactgtccaagaccacacgacttcgagaacggggaatactggccccggtctccctactacaatgtgagtgatgagatctctttccactgctatgacggttacactctccggggctctgccaatcgcacctgccaagtgaatggccggtggagtgggcagacagcgatctgtgacaacggaggtgagaagcatcccctccccctacattgctgtctccctgacggcgcccagcccgaggagtgggcactcggctccggacactgtaactcttgctctctaccttgctcacggggcctcaggcttcagtgcttacctcgatgtctcatacctctgcagcggggtactgctccaacccgggcatccccattggcacaaggaaggtgggcagccagtaccgccttgaagacagcgtcacctaccactgcagccgggggcttaccctgcgtggctcccagcggcgaacgtgtcaggaaggtggctcttggagcgggacggagccttcctgccaaggtgacctttgacctgtacccccaggtcagatcctggtcttccatcctactgtcttctctccccacctcaaccctgctctttcctcactttgtttaaacctccctgtacaactatctcacttctgagccttttataccctggaaacccatgatcccccgtctctttggtcactgtatccctgacactcccagacatttgacctcatttctgactctcccagactccttcatgtacgacacccctcaagaggtggccgaagctttcctgtcttccctgacagagaccatagaaggagtcgatgctgaggatgggcacggcccaggtttgaagacagagaagggaggcagggcagggaactgggggaaaatggagaagggacagaactgttaatgctggagcctgagccactctcctggcacccaggggaacaacagaagcggaagatcgtcctggacccttcaggctccatgaacatctacctggtgctagatggatcagacagcattggggccagcaacttcacaggagccaaaaagtgtctagtcaacttaattgagaaggtggaatcctcctatccctgaactcgggggaatggaatctcgctgatcttccaggactagctccctgatcattccagcccctctgaacaacagggccccaggaaaatctccaggtcctattctgtcctccttcccttttacttgaagcagtttcttgactggtaattcctccatgaacctcagcccttgagcctcttactgagggcctccctgtcccagcaaagtcgctgaaatctcccaatcacagtattctattttcaatgccatggcgccttgttctcctcacccacaggtggcaagttatggtgtgaagccaagatatggtctagtgacatatgccacataccccaaaatttgggtcaaagtgtctgaagcagacagcagtaatgcagactgggtcacgaagcagctcaatgaaatcaattatgaaggtcagaggttagggaatggtgggaggttcactttggggtcaggaggttcagggtggagggggtcatgagactaccttgagggcgacagggaggaccactttgtagtcaaaggttgaacagcaggatcgttgggcaatggaggttagtgggaacctgttgggggctggaagggccactttgtggtcaaagggaagtccgtgtaatgatgattaacttaaaaagttgaaagatgtgggatttcagttgcagattggtctctggggttaaaagatggcttggaagaccaggtgaggtgatggtctcttccctctccacagaccacaagttgaagtcagggactaacaccaagaaggccctccaggcagtgtacagcatgatgagctggccagatgacgtccctcctgaaggctggaaccgcacccgccatgtcatcatcctcatgactgatggtcagaagggacctctctcctgtcccagcctccccaccttctcagaccagcatgtggcccttaagtccacttgtaacactatacccatggttggggccctgaatgtgactcatagctggctgttcatctctcctgtgacccttcataaggaattcttcctaagccctgtgatcaactatctctaacccttcctcaacttgctcaccctgccacgtgtatccctgcctttagccagtttatcttccttatctcctaccctcatggtcctgtctcttctgcaggattgcacaacatgggcggggacccaattactgtcattgatgagatccgggacttgctatacattggcaaggatcgcaaaaacccaagggaggattatctgggtgagtaacctgcctaggacccagcaccccacttcctcagggcttggaccctcatccttcctttttatccctcagatgtctatgtgtttggggtcgggcctttggtgaaccaagtgaacatcaatgctttggcttccaagaaagacaatgagcaacatgtgttcaaagtcaaggatatggaaaacctggaagatgttttctaccaaatgatcggtagggagatacaagggaataaagaacacaactctcctcaggttcccctgaagtaattcattcttcctctacacctgaagctctagttgcctggaaagccttcttcattcctccttctctacctcagtgtcactattcttgtttcctggcactgttcacttaaccttagaatcacagagctctgagcacttcagagatctttctatagtcctacatttgacacatgtggaaacagaagccaaaggaggtcaagggacagcaagttagcaacaagggtgggcttgaaaacagccaggcctctgacagcttgatcccaagttctttcccttttcagtccaccatagcagttttctcctaacacgaggaaacaaatacccgtggtctttccctttctccttttgggcctttgctccccatagactcctacccaaaaggctgctgccatttgggaatgaagtgttccgagttttcagcacattctccttctctgccagatgaaagccagtctctgagtctctgtggcatggtttgggaacacaggaagggtaccgattaccacaagcaaccatggcaggccaagatctcagtcattgtaagcacagaatcccagtagtggggacttgggggaggtgaggtcaaggtgaaatgggagtaggggaaggaaaaaatggccataagagatggtggtttgtgaaagttgagctttccctctctactgttgtgtccccagcgcccttcaaagggacacgagagctgtatgggggctgtggtgtctgagtactttgtgctgacagcagcacattgtttcactgtggatgacaaggaacactcaatcaaggtcagcgtaggtaaggatgcaactgaaggtcctgggctgcacctatgctctccaggcaacacctcccactttctacagatcctacactccacccatcctcaatgcagccccattccttgcaccccagaccagtcagggatgggggaagacgtgaagttaggaatgacacggggccagaggcaggaagctgcccacaaagaggtggtacctactctcctacttcaggaggggagaagcgggacctggagatagaagtagtcctatttcaccccaactacaacattaatgggaaaaaagaagcaggaattcctgaattttatgactatgacgttgccctgatcaagctcaagaataagctgaaatatggccagactatcaggtgagagcgtccagatccctgaggaaaggctgggaaaggctggaggactggggtgaggagcaggcctggtttgctgttctccttgtcctttataggcccatttgtctcccctgcaccgagggaacaactcgagctttgaggcttcctccaactaccacttgccagcaacaaagtaagacatacttggcaagaggataaggatgagatcccaagagacaagtggggcatgagagggaggtgcaataggaagagatgatgcctggcccagaacctagctctagaagggcttaggggacatctactgagtgacaaaggcaatggggagatgacagtggtgggagcagctgaagtgacgcagtctattcgtccagaggaagagctgctccctgcacaggatatcaaagctctgtttgtgtctgaggaggagaaaaagctgactcggaaggaggtctacatcaagaatggggataaggtgagaaacgggcatcctaaggaggcactctaggccccaatccttcctaagccacttctgttcattacttctccatgcttcccacctcccctacagaaaggcagctgtgagagagatgctcaatatgccccaggctatgacaaagtcaaggacatctcagaggtggtcacccctcggttcctttgtactggaggagtgagtccctatgctgaccccaatacttgcagaggtgagagaatgctctttggttgtgctacaagtgcccaaggcccaacagtccttttctctacagcttctcctctccttgcaggtgattctggcggccccttgatagttcacaagagaagtcgtttcattcaagtgagtcctccctttcctatctggggagatgccaagtggtcagcatgggccccaaagcaggaaagctcaatgcatgtggctagtaattcgaggtaggcagagcctgcctcaccttaggaccgcatgtcttgcctgcgtgtgtcaagaacgaggctgagctgggtccctagtctgattcctttaggtcagctaagacacaagcaggaacagccatgcttccaggattaggaattctactgaatgatccatggcaccccactgcctctgcaggttggtgtaatcagctggggagtagtggatgtctgcaaaaaccagaagcggcaaaagcaggtacctgctcacgcccgagactttcacatcaacctctttcaagtgctgccctggctgaaggagaaactccaagatgaggatttgggttttctataaggggtttcctgctggacaggggcgtgggattgaattaaaacagctgcgacaacacctgtgttccagatccttttggggcaagggagtggggaacaggcactggccatgtcgttacactgagatcaaacctgacagccgtttttaaaggcttaaccccaatcccaagtgctgaaaaaccagaggctgagggagatgtgtaagcttccacctcagtgttttactgagaccagcattggggcatatgaggcacaaggaatccagctctgttccctagaagccatccacaaggttttccttgtagacgtcatcactgtagacaatctgggtcctcttgtcccggtggcaacccttagggctgttctggacagctagggagggaggagaggaacagttaaggtctaaaggagatcatagaacagaccctgaggctgactcctgaccacctcactcctggccactggcccctggaagcccagtttccacgctgccctctggtggccaggatggcctgtcttccttagctcctttgtgccaacccatggccaagaaaagtataagtggacattttgatgaatgttttgttcttagaaaaatcccaaatgtcattgttgagacacgtgaatgatattaacccactacttacagtcagtatgtcagaagctaaaaactagaaaacctctgtagcccttttttgacatgctggtcaattctagttcctttcttttgcctgaagggccactgtagctgagcccttctttctgctcactcctttcccaggaaaatctactttcagggaaaatggattattcacactaagaaatgctactagctccaccagaactcattcagggtgtagctttggccctcaccattctctcttaagcctctagctgtttcttccccttcctctttcctccctccaccagacatgttactctcttcaccccatccaatggttccatccccaccacccttgagctacagagaatctctctcacccactcccatcctgtgatctctgtgcctcaacactgctggctactccctctttctcaaagtgtgtgtccttttgcttcagtggcccaggcccctgcggtgctgctcccagccctccgacccctcctcctgtctcctttgctaacgttaggctcaacgttagcctaacatgtcaggacagctggggacatgtggggtgtgaggtgaacagtcctgtttcctaacatagtcccagagtactcctcaaactgagtcctgggtcgtttttttttctctgaaatcagagtctccctgatgatcctattgtttggcagccaccctgtgatgtggatgacttaatctatgttttccttccttacctcacacctgagttccagatccctgatttcgaatacttatgaaactcactctactccatctcaaaatgaacaagccccatgagacactcatcttcctcaccaatctcactccagctcccactttcttccctgttccagtcactgctttggaagctgttttcaatccttttctctcctttctttacctctaactgacagaggatctgaaattttccttcccattcccatagcctccgcacacactctgacctcgatcatctctaggaaacccaaggatgtgtgggggaaccaaaaggaatggcctgtgggggagaggatgggaaaggaagaatcccattcttaccgagggagccccagacagacttgccagtagcggcatccagcatgggctgttttcgggctatgttgactttgagctgtacagactccacctgggtcccgttgagctgaagcagaagaggggaggcagaggatggggaggaaaacattacagataaaccaaagaagttattccaggagttgctatcctaggaggagactgaataaggaatctgagaatgtgagtttttctgtgtgaatagggagaggctttctttatcaagaggaaccaacttcttcctggcatctagtattttgaggagaacacatgagaacagcagaagcgatgggaagaacagatttgggaagttccaacctcagcaacggcctgatctgctgactccatcttttcataggtgacgaaggcacagctgggataagagaaaacacggtcagtggagagccaaggggctcttctggacccaaccaaacccagtgataataggcggctgcagggagggcagcttcttccctcaggtctcacaccccaggattctcccaggacttctcatcatgccctgttgtcatccttactttctgggtgggtccatggagaggtcaatgatgtttccaaaaggagagaaggccccacggagaagggtgggtgtcatgtcttctccatatacatagagagtattccctttcctaggggctcgccgttcagggaatgaatccgaccctttgggagcacaaatcatagtcacaagacatagcccatgccacatttcacttagtaggacccacataaacctcagttaaggtcaccttgacctccagccaaaatcactcactgcggaaaggaccctctcggtctcggtctcgatcccgctcccgatccctgtcccgttcccggtctcgatctcgatcccgatcccgatccctgtcccgctctctgtctctgtctcgatcccggtctcgatcccgctcccgatctcggtctctgtcccggttcctctcatggctgcggtcccggctgcggcttcggggaggggaggctgaggagtgggcaccactgcgttcttcatagccccagtcaaagcttcgagggggaccatcaccagcccctgggccctctgcctcttctccatctggtcctagttctcgaagtcgatcactagaagacacaaagctggggagatgcagactgaagatcaaaggggggttttaccttctcccctcagaccctgtggagactcaatattccctctatagcccagctcctacagcccaaacctcccaaggactcaggcaatcaactccaccaaatgggcccagccttatctctactctctaacctctcatacagagatttcctctggggacgtctggatgactgtaaaagagaccaagaacagttaagatgatttccagttgctgacatgtggtccaaaatatatttgtctctcatattcctccatccccaacccctcagggacagaaattaggagcctttacctcttgcaggtcatcatcagcagatatgctcctctggaacggctggaaagtggggactggtcccttctcggggtcctggagtggtgagagacctacctcagtgtggagcaggaggttgcccaaccatggaccagaggtgttcctcttccctcaccctcttctaggtttcctctgatcttttcttcccttttaattctacatacatttcttatttgacgtggttttacttatttttttttttttttttttgagacacggtcctgctctgttgtccaggctggagtgcaatagagcaatcgtagcttgctgcagccttgacctcccatgctcaagcaatcctcctacctcagcctccctagtagctgggactagagatgtgctctaccatgcttggctaatttctgtatttttttttttttttgtagagatagggtttcactatgttgccagggctggtctcaaactcctgggctcaagcaatcctcctacctcggcctcctaaagtgctgaaattaaccaggaatgagccattgccgcacctgccattgtggcttgttttgttttgtttttgagacagaatcttgctctgtcgtccaggctggagtgcagtggtgtgatctccactcactgcaacctctgcctcctgggttcaagtgattctctggcctcagcctcctcagtaactgggactataagtgtgcaccaccacattctgctaattttttttttttttgagacggagtctcgctgtcacccaggctggagtgcagtggcacaatctcgactcactgcaagctccgcctcctgggttcaagcaattctcctgcctcagcctcccaagtagctgggactacaggcgcccgccaccacgcccggctaatttttgtatttttagtagagatggggtttcaccttgttagccaggatggtctcgatctcctgacctcgtgatccgcctgcctcggcctcccaaagtgctgggattacaggtgtgagccaccgtgcccggcctcacaccctgctgatttttgtatttttagtagagacggggttttaccatgttggccaggttggtcttaaactcctaatctcaagtgatctgcccacctcagcctcccaaagtgctgggattacaggcatgagccaccacgcccagctggtattttttataagtgactcgatatattatgtattcagtttatttgaacctctcttgaacctgataacattttcagccctttccatcccttagggcaacatattccaagagctccaatccaaggtggattagaaccacagaatttgtaaaatggagaattcaggagtcgtctagttttttcattttatacatgagaggtgaaactcagaatggtacagcaatttgccagtgcttgagtatgcatatttttccccaaacccatctacattccaacttggagggatgccctttaaacaatctttctgcttgtgctcacctttaacttcccctcaagggttcgagaacgcttgaagcctgagttcttggtctcagccttgatggcactgatggctcctgacttcaccagctgctttgcctgctctgttgctgtggctgtgtccatgacaggctgctctgatagtgctggagagacaaggggaagaggcattatgttggccaagccatgatgaaggtcagctccatgctgcccacttccagtccatccccatttcccctgtcactcacagcgtttgacaccaccttggctggttgtgctgctgctactttgcttcttcagagccagcaatgcctttttctgggaacaagggtgagaagagagaggtaagtgagggccagcccctagccggttcctctcctaaggcccctgggcacatcactccagggaccatctttcttgatgccctcagagtggtacactgatgtgctctgcctcttgcctctggtcccctagatcatgtatgatgctggaaattcctaatctaaccaaaccacggaacccagaggttttccagagtgttacatttttgaagttgaagacaaataactcaatcatggactagaatcctaggatataagctgcaagtaagtataagtttatgtgcctttcctggaagcttcatccatctatttcctgcatattgaatgaggcccagccatgacttcgtaacagggatatccaggaggctaatgcattgttcctaccctcaagaagcttacagtctgagaaataaaatacattgagttagcaatacaattataagaggtgcagattattcatagctgaaagctagtaagattttctgatgtttaatggctattaaactaggccctctcccgtatctctgcacaacacagagaggagaagggtattttagaaaaagaaaacagggtggcaaagatgcagagataagaaggctttgggaatgcatcttttggaagtagtgaatagttctactttactagacaaggctgccaaactaaggttttgaggcttttttatagacaatgtgaagccatttatggtttttgagaaacagagggagcagaattttgtgttttcaatggatcatttgaacaggagtgaagaagtctgttcaaaaaaaaagactgagaaatttgttgagagaccattacaatggcccacatgaatgtcaataaagccctgctcgggggaatgcacagtgaagaataaacaggaaaaattacttcaaaagaagaaacaataagacttggcaaaggtttgactatgcaaatagtggggaagtcagagttttgagtccaaacatgtggcagaattggtgtagtcaatcttatttggaagatcaagaatagaaagatgatagcttcaacactgagtatctgaagtttttcagtataacactggatagaactggaaaaaacaaacttggggatcatcagctcttaagcggtactaaaagccatgggaaaggaagacaatccatggcaaattgcatagaaaagacagaaggtccacaccaaggcttgggaaagcccacctctcgaagctacactgtgaggtgatatgtctctaggtatgggccagaaaaacttccccattcgctcacactcaccccatatcttctcagagtgcagagtctgtgaaaggttaggccatgtccacacacagtccctcacctttttcttgagcttgttgaatttcttctgcagagcctcctcttcctcgctcagtccggggggtatcaccaacatggtggctcctagttcaggggcagggcccaagacatctttctccactgttaccacccggggttcacacgccgtccacactgtacccaaccccaccccttcaggtctgcctactcttgtctttggctttccctaccccttgcttaaaccaggctgctgtccaagctcccgctggtcgggatcatccagcattccctcctgtctccagggatcacagacaccagcacctttaggtaccatgtggttcaaggagggacaaatatccactccgtcggaaagacgatggcacccgacccccctaccctcgctagggtaaggacaaccgcggggtttgaacggcagagaaggcggtggagccagcgtagcgcccgcagagcaacgcaaagaggaagaacagagaaacggctatgagaaaaagggccgaagagtgagaagcagagggccttacccgagggggcggcaaccgggggccccacggtctccggccgcgcccgcgctggccgctgatagcgggctcacaacgatgacgtagcgaggagcggaaaacgcggtaaccaaggcggccccaggcgcgcacttccgcccggccttccaccggtccaggtctgcccctccgcagcgatagttcacgctctcggcggggctgtaccggaagttgcctctacttccgcccgttccggggcggggcttacttcgcagcgactacttgccgcacttccgggctgccaggcagctgctgtggctccaggatgatggagacagagcgacttggtgagggggaggggagggaaatggaacggagtagccgatatggaatgaactttgacccctgacttttgacctttccccgtagtgctaccccctccagatcccctggacctaccccttcgggccgtggagctcggatgcacggggcactgggagctgctgaacttgcctggagctccagagagtagcgtgagtgacttttgaccctaacctttgacccgcattgagtccaaacctccttcaccctcctcacagtaggatctagcttaaccttgttcatctgtgcctgtactcctgtccatcccagcctgaaggggtgctggacagattacagcccagtgtacctgcagtacgtgtgaggacagagcagaaagggctggggatatttttgctttgagagctgctctttcaaatgtggcatttctccgtggagctcccttctgtatccaagcaccagggcacttggtgactgagatgataggctttgagcctccaacctttcatccttaggtctgggacccctttttctaaaatcagtgagtctccaatttcagtgtgcttcatgattagccagggagctttttaaaaatgcacattcctaggtccagcctccatgtttctgaaatccaaaatctgccccaggtaattcagtagcaggtagtttttggccaagcctgattgtcctagtctgtttgacacatctgccatttctgatctgaacacaagtcccatcatctcttttgtctgcattttatcctctttccttacctaatgcctctcatcttgcccttgtttcagcttccccatggcctccctccttgtgccccagatctgcagcaagaagcagaacagttgtttctgtcatccccagcctggctgcctctgcatggtgtggagcactcagcccggtgaggagtctggaggggcttagactagggtgatgggttcctgaaggaagctgggacagaggaagaaagaagacccaaaagttactatttttctctccagaaaatggcagaggaagacggatccctggtctcttttggctgtcctgggagccccagtcccatccgacctacaggcccaaagacacccaaccacaggccagatactgggttacaaagaggtaggaggtcaggggtcatgagaaacagttggggagaaggggaggtggtcagagacaagctcagcctcattggggctctgatctcttgccttaggtcttgctggagaacacaaatctctcggctacaacctccttgtctcttcgccggcctccagggccagcctcccagtccttatggggaaatccaactcggtatcccttctggccaggtgactcttgtggagatgggatggtagaagagggtgtctttaatctccagggaagggttccccacctatctcgtattaccctcatcccatgaatccctgtctgtcctgtctcttcccaggggggatggatgaacccaccataacagatctgaacacacgggaggaggctgaggaggagatagactttgagaaaggtaaggtggggctctgagtctgagccttgaggaggaagagcccaggctatcactgggctactgctagccctcccatgtttttgagaaaattagaaaaagatattctgtccataacaacctttactgtcatctgctgggaaatttctacaacaacctttactgtcatctgttgggaaagtgtcatagcaaacatccctatctacagcatctgtcctgtaaatggtatcttttaggtttatataatgtacacaatttgttcaccagtgtgcagtgacctgattccatgtccctatcctacagatcttcttactattccacctggtttcaagaaaggcatggactttgcaccaaaaggttagttttagtttttgagtggggtgtaggagaagtcatgtccttctcctaaggaacagagatggacatgacaaggttgaccttgttggcttgctcctcagattgtccaactccagctcctggactactaagccttagctgtctgttggagcctctggatttgggtgggggtgacgaggatgagaatgaggcagtgggacagccaggaggtcccagaggggacactgtttcagcctctccctgcagtgctcccctggcccgagcaagcagcttggaagacctagtgttgaaggttggtggttctgtgtagtggaggcaagaaagagccttgccaccaggatgtgggctggctaggatgggtctgaggggaagaaagggacatcttttgggaggagtgctaattgagagccctctggttgtatctttatcactgctacccctgactcttccaggaagcgtccacagctgtatccaccccagaggccccagagcctccatctcaggagcagtgggccatccctgtggacgccacctcccctgttggtgatttctatcgcctcattccccagccagccttccaggtactttggccccatcttcacacgctcctctacctctttctgggtcacactcccagccgaccccttgtctcctctattggccagaggtcagatccatcccaggccagtcttggtactcagtcccagcctcggctggctccggccttcatccgcccgccctgcgtgctccatgagcaggaggcagcaaggccccgctcctttcttcagctcctgtctatttctctctcccatagtgggcatttgagccagatgtgtttcagaaacaggccatcctgcacttggaacggcatgactctgtctttgtcgcagctcacacatctgcaggaaaaacagttgtggctgaatatgccattgccctggcccagaaacacatgacacggtatgagttcctttgccaacctcccccttcaccagccagccccattttctcctgcatcctttgaaaatctcatctcttcccccacctctctagctcatcctttaagtgagaggttcagggctaagactgagacaagagcccagagagaaatgaaaagacatggtggggagaaagtttagaagaatgacctgggttagtttaggaaggggttggggacagaatttttctggggttatatcatgcaggagaatgtaagggcagtttgggtgaagaagaggagcacctgagcttctggggcatgcttccacgagggctccatgtgggagaggaagtgcgggccatgagtctgcggagggactggctaacttcatgctctcttcccagcaccatctacacttcgcccatcaaggccctgagcaaccagaagttccgggacttccgaaacacattcggggatgtggggctgctcaccggggatgtacagctgcatccggaggcctcctgcctcatcatgaccacagagatccttcggtgagagatggacactcaatacaggggagttttggctgggaagatgtggccgttgtggagagtgtgctgtctgaggagggggtggagacgagccactggagagtcaatccttggcctcttctccccagctccatgctgtacagtggctcagatgttattcgggacctggagtgggtcatctttgatgaggttcactatatcaacgatgtcgaggtaagggccatgggctccccagaacccggcagtcctctcctttgggaccagttgagcgtctcccttattccacacactcagggccccttactgctttctttacccccatatggaatcctgtgcctctttatgggcagaagggcggcccctgccctcatgtgacctcccttccctctctgtgcccagcgtggggtcgtgtgggaggaggtgcttatcatgctacctgaccacgtttctatcatccttctgagtgccaccgtccccaacgcccttgagtttgctgactggattgggtgagacgtgtgtcccgggttgcctgggtgaagggggctacagtactccttgattcgggtgggggactaagtctaccacagcaaggagagcggtcaggccttaggggtgatgctggggaacatgtcccacctggtggctgtgggatcccctttgggtccagattactttgcatgttgaaatgggatgagatgttgggggatagccttccattctgggtctcagaaaagactgggtaaagttggaggggtagggaagggggtggggatgcgggttccttcccacgttcccacccctgacctgcttccctctcctttcttcaggcggctgaagcgtcgtcagatctatgtgattagcactgtaacccgccccgtgcccctggagcactatcttttcacagggaacagctccaagacccagggggagctctttttgttgctggactcccgaggagccttccatacaaaagggtaagcctcgagatgggggaaagagttagggctgggcccccagctggacattgtggctacccctccctgtgccccaggtactatgcagctgtggaggccaagaaggagagaatgagcaaacacgcccagacctttggggccaagcagcccacacatcaggggggccctgcacaggtgagaactgggagggttttgtacctgccagcacctgtttttcctcctatcttttttttccccttgtcccccaggggttttgacttgagctttgagcactgccccagttaacactagctcacctctcattggttcaggaactcaacctctgctccttccccttccccttccttctccaggaccgcggagtgtacctgtccctcctggcctccctccgcacacgtgcccagttgcccgtggtggtgttcaccttctcccggggccgctgtgatgagcaggcctcaggcctcacctcccttgacctcaccaccagttcggagaagagcgagatccacctcttcctgcagcgctgccttgctcgcctccgtggctctgaccgccagctgccccaggtgcgtctgtgtgcgtctgtgtgcgtgcatgcacacatttggcagactggtggggatagggtgttccgagactccatccctgaccatgggcctcctcccaccaaaggtcctgcacatgtcagagctcctgaatcgcggcctgggtgtgcaccatagcggcatcctgcccatcctcaaggagatcgtggagatgctcttcagccgtggcctggtcaaggtgcatgtggtggtggaaagggactcctcagggtgcttgttgcccacttaggggctgtccagagggcagaggggcagaggtttaggcaggccagtgctgtggttaagaatctgggctctggattcagactacctgggtttgaatcccaggtacaccatgtattcacagtatcatcctggaccaattatttaaccttcctgaactttaggtttcccatcttaaaatggggatgcataagatatgaatacgtaggtctcagaaaagaaacccaggaagctagcaagcattcgaaaagttattagtaatcagaaatatacaaattgaagtactcacaagatacgactttacagctattagactggtaaaatttaggaaactagttcatgccgagtgttgccagagatataggaggttgtagggttctgggaatcctttacgggatgcctagccagtttggaatgcacgctggcactatttagacaaaataactatattggccgggcatggtggctcacacctgtaatcccagcactttgggaggctgaggtgggtggatcacaaggtcaagagatcgagaccatcctggccaacatggtgaaaccctgtctctactaaaaatacaaaaattagctgggcatggtggcaggtgcctgtagtcccagctacttgggaggctgaggcaggagaattgcttgaacccaggaggcagagattgcagtgagccaagatagcaccgctgcactccagcctgggcaacagagggagactccatctcaaaacaaaaacaaacaaagaaacaaacaaaaactatatcatactctgagcttatatttcattcctgggtatatatcacaaagaaattctcaccctggtctgtgagagaacatgtacacccatcctttgtttgtggtggcatggtgttggtagtaccagggtgcccttcactgggagagagggaaggttagtgtgggggatgcacccatagagtgttctgcagcagttggaagcagtgggttagatgtggccacaggaacatggacaaatgttgaaacactaggtggagaaaaagaagcaaaaaaaaatcagatatataaccactttttatatgaattataaactacaagctcacaaaagaagacatgttctataagatcatatttatataaaaagatatttgttggatacattggaatgattgcagtcagggatgggaatgggatatgaaggtaaaagttaagaaatagaaataagtagctacataagtaaaatgaggaaaacaataatacctgccctatagatttgcctggagagttcagtgagatcccataagtaacaactgggatggtgccttatgcctacaaagtaaggtgggcttggccagggctgggggtgtgtgtatgtagagcctttgctgatcctttctgttctcctctgtcccaggtcttgtttgccacagagacctttgccatgggagtaaacatgcctgctcgtacagtagtgtttgactccatgcgcaaacacgatggctccaccttccgggacctgctccctggggagtatgtgcagatggcaggccgggcagggcggaggggcctggaccccacaggcaccgttatcctgctctgcaagggccgagtgcccgagatggcagacctgcaccgcatgatgatggtgagcgggccagcatgctcggcagggccccagctccaggaccttgctggattctgtcttcgattctcctctcttctttttcttcttccttttttttttggagacagggtcttgctctgttacctaggctggagtgcagtggcacaatctcgggtcaccgcaacctctgccttccaggctcaagggatcctcccacctcagcctcccaagtaggtgggattccaggcacatgccacacaggcctggctaattttttttttttttttatgctttgtagagatgaggttttgctatgttgcacaggttggtcttgaacttctgggctcaagcagtctgtctgcctcagcttcccaaagtactgggattataggtgtgggccacagcgcccaacttcctccgacttttttgttttgcctgggagaagctgaggtaggagtgagtgaatccaaggatgagattggagcccatctcttccagttttctcccatgtgaatatggagctagatggggcctttgagtccatttatttcagtttgctcccttatgttacagaagaggtgagcaagtggtttgtccaaggctccatggttgcagagctaggaccggatctgacgggagtaggcccagtccagaagactggctggggttcagtaggtcccaccctgatctcagtgacttctgtgacctgactccaggggaagccgtcccagctgcagtcccagttccgcctcacgtacactatgatcctcaacttgctgcgagtggatgccctcagggtggaggacatgatgaagaggagcttctctgagtttccctcccgcaaagacagcaaggtaaggagcctggggtaaccagtgtgtggagcaggaggttggccaaagacaggctgggaataggtaggcatccagaggccagtgtgttgagggtggggagtgtgacagattgggcctggagactcccctttcacagcttcccctgctcccacccaaggcccatgaacaggccctggctgaactgaccaagaggctgggagctttggaggagcctgacatgactggccaactggtcgacctgcctgaatattacagctggggggaggaactgacagagacccagcacatgatccaggtgagcaagtgtgagtgctgaggaggtgataggagaagggaagagaagatcgtgttactctaggtgctactaaacttagtccaagtgtctgtccctgtgatgcctcctcccatctgtcctttgctcttcagcgacgcatcatggagtctgtgaacgggctgaagtctctctcagcaggaagggtggtggttgtgaagaatcaggagcatcacaacgcattgggagtgatcctacaggtgagggtgatgggaatttggactccagagggtgggagggagcaagccctctctccattttccccacttggccagggcaggttgcgtcatcatagggccctcattttcccctcttgccctccttttcaccctcccttcccatcaccacatcatgttcactccttcctcccaccaccccaagaagtctgctctgatcgcttgacttggttgcccctctctactggtgagctctgcatggttgcttcctgattcctgcccaagggtgggtatctggtctctgcctttgatgtctactcatcacacccccctctcctggcctctctgaccacccccaggtctcctcgaactccaccagcagagtattcacaaccctggtcttgtgtgataagcccttgtcccaggacccacaggacagggggccagccactgcagaggtgccctatccagatgacctcgtgggattcaagctgttcctgcctgaaggtgagagtgtggcagatgtctgttttctgccagcagtataagcaggatgcctgggtccatggcaatgtctgccctgctctccccttttcacagggccttgtgaccacaccatggtcaagctccagccaggagatatggctgccatcaccaccaaggtgctccgggtgaatggggagaagatcttggaggacttcagcaagaggcagcagccaaaattcaagtcagagatgctagggaggcccttctcctccagaggggcacgtagaggcagggaggggcagtggtctgggagtttcctccagcctgagggagaccatgaagtggtggggttgtagtgagggggctcccccagcctaagggagactgtgaagtggaggttgtagtaagagggcttccacagcctgagggaggcttctgggggagagaagatcttaccccagatcttaagatctgctccctcttcaggaaggatcctccccttgcagccgtgaccactgctgtccaggaactgctgcgtctggctcaggcccacccagccggacctcccaccctcgaccctgtcaatgacctgcagctcaaagatatgtcagttgtagagggtgggctccgggcccggaagctggaggagctgatccagggggctcagtgtgtacacagcccccgttttcctgcccaggtaggaccctgggtggtaactcccaagctgggagtaggggcttttcctctgtggtcccctgtagactgaccgcccccatctcagcccttgtcctcagtgcacccctgctaaggggcaaggagaaggctgacgggtggctctctgcagtacctgaagctgcgggagcgaatgcagatacagaaggagatggagcggctgcgcttcctactgtcggatcagtcattgctgctgcttcctgagtaccatcagcgagtagaggtgggtggggcagtggttggggcaggggggctaggggacagcagtgtgtccaatgcccaccctttttcttgcaggtgctccgaaccctgggttacgtggacgaggtgggcactgtgaagctggcagggcgggtggcttgtgccatgagcagccatgagttgctcctcactgagctcatgtttgacaatgcactgagcaccctgcggcctgaggagattgctgccttgctctctggcctggtctgccagagccctggggacgctggggatcagctcccaaacaccctcaagcaggtaggggacaccacccctttctccctgccagggctgtggcattcctgaccttcaccttcaggtagtcccccaggtgaccccctccagccctgtaagtgccccaaggatggaaaatggctgccttcttgatctggtccttccctgtcctggagcaggaaggcaggccttaatctctccttctttcctgcagggaatagaacgtgtccgggctgtggccaagcggattggtgaggtccaggtggcttgtggcctgaaccagacggtggaggaatttgtgggggagctgaattttgggctggttgaggttgtatatgagtgggcccggggcatggtgagtacctgaggtttgggattttgcagacggctggctggggagaacctgcccaggctgagtgcatccagtcctcaccctactttccccacagcccttctccgagttggcagggctctcagggacccctgagggcctggtggtccgctgcattcagcgcctggctgagatgtgtcgctcactgcggggggcagcccgcctggtaggagagcctgtgctgggtgccaagatggagacagcggctaccttgctacggcgggacatcgtatttgcggccagcctctacacccagtgaatgccccatgtaaaaacatgatgataaaacagcaaagcactgttgtgtgcttgagttgctggacagggatgactcagctaagaagacagcgagagaacctcttagaaatatgcttttattatctgcacacagagatatgactgcctccctctaaagcattactatttgggagagggagtcttggggggtgatgggaggtcctgagtcatagcttccacataccatatgggcaggaaggcgtaaggtgcatcttggtgtacagacacggtgactgggccgccaggctcccaagagaagagatgaacgagcctggggggcagatggaggcatcagttgagggccagaggctggatcctgggatccagaggggagggacagagctgaatgcctcacctggggtcatcctggacaaccgtgctctgggcaaagctaaggaaggcggcacagaagttcatgcacacagagggattccagccgtcacggtcattctggagcaggcagaggaggaggcagaagatgggcagtgggggtggtgggaggagagaaggcaggctgttgccctggatgctagacctgtggtcttggtgtttggggatacgggtgggagctgcaacatcgttcccttaccctgacatattcaaacatcttcatggtaggaaaggtcttgagggaagagacaaaaccgtctgggttacggaagccagcaacaacattcgggacccctgggaggaatgactgagcccaccatttcaggagcttgtgtctgacaggaaaagcaagggatcagtgggacccctcgtgcaccctccattctgccttcaccctcctccccaagtccctttcccagccttcaagcctaagctctcgccctgcccaccccgatcctgaacctgtagaaactcctccattggccagggctgtgcatctccttggaggtcttgagctccacatagcaggttgggggctgtgtggatggggcttgggggtctgtgcagtctacctcccctgagaagagcagagggtggcttcccaggcggctgcgtagcacagagcagaaggccacgttggtgttaacctccccagaggggtctggggagcttccaggtttgtctgcacaaggagagaagcagcagcaggcgtggcgggctctcaacctctgggaaggggaagggggctatgaagcaggggcaactcacctgcacacatgtactgctcaaatttgtatcccatgtacataagctcccggaggagcggtggccgagcaagcctctgggcccgagcgttcggtgtctccacttcactcaggtatagtgttccctggaaccgggaggctgccagctgccagccctcctgccgctcatacggtgtcgtcagcagttttgtcaggtgcccccgccacgtcactatggcctctgccagccagcctggacccctgagaggcaggagttacaggctgaaggtctgacacaagcattagtgagatgctcccctcgaagaatagtcttgtttcttctaaggactgattctcaccccggctttggctctcctaattttagagggtaggtacgggtctccagatatactgcctaccacgctttgctcacccctccaaccggcctcggtgttccaggagccagcacagcaggtggtccagcctttcctggacctcctcgtcccggggctggtatcgatccgggtatccgtctctgaggtcaaagttggggcctggaccgttagtggggggtgggctatagtagcgcagggctcgggcatctccatggtactggcgttgagcatccagggagaagcagcccagttccgaagggcgccggtagaaaggaaagggcccagagtagagggcagggtctgtgggcagagaaggtgctggacgaggtagtttgttccgaggctcagctacctctgtcttctcagctcctctcttggtccccctgggatccatgaggtcctaagacaagcaggggtacagagtttccattctacagaggaggcctggagaaggatgactggtttaggactaagcgagccacctgatcgccaggctctggccttgaaacattcaggcccctcagacgccaccgcggccaagctctcatcctgcctctttccttgcccttcacccaccctccctccaggtcctccaaatgcagtgaggttaggaaggacgtctgcgctcagatcaagaatccagttacctcaaagctccccaacttccacctccgcagagctatgacgtcatggcaggcacgccagaggccgaaggatgcaaaagtggttttctgctttcgatgatgcaatcattcagcgacagtggcgggcaaacccctcccggggcgggggaggtgtgagcttcacgaaggaggttgacaccaacgtggccaccggcgcccctccacgccgccaacgagtccccgggcgtgcgtgcccttggagggagccaatccgcggccggcgtggggcccggcctggcggaggtgatgctggtatgtgcgtcgccaccgcccctcccagcactgacgggcctgagggacgacaagttgacgctcctttcgtcatcacctggtctaggagggacgcccggggagaccgtacgtcactgctctgcgccggaagaccctattttcaggttctcttccctccattcctaccccttccccggtaccataaaatcccgggatatgagctggaagaggcatcacctgatcccggagacctttggagttaagaggcggcggaagcgagggcctgtggagtcggatcctcttcggggtgagccaggtaaccatggcaaccccgggggtggggcctcgcttccggtagccgagagttttgttagaaccgcgtccccgccccagttccctgtccgtgagccgatttatctgcccagggtcggcgcgcgcggctgtctcagaactcatgcagctgttcccgcgaggcctgtttgaggacgcgctgccgcccatcgtgctgaggagccaggtgtacagccttgtgcctgacaggaccgtggccgaccggcagctggtgaggggcgtcggtgcgaccgccggaagcccctttcctaactcctggaattccctgtcactcagtcactccgccagccgttcagcaagcattaggcctttcaggcgagggcactgtgccaggcactggggtgccacagagaccctgttaaaagtcccgcaggtagtacagggcatttcaaatcatggaggtagaagaacgaggcttttggggaaaccgagtcatggggcatggttcgaacatacagcgctgggagtgcagtcagacgtcagatcatgacaggccttgtacatcagtgttgtttccatcttacactgaggcgatgggctggtagagaatatcatagagagagggaatggtgtattggagatagtggatgaggcagggaggtcagctaagaagatactgcatctgagaagtggtgaaggcctaaattaggtcagtgcagtagggagggagaggagagtgaggaagagggaggagtccaggacaactcagactttccagatgactgcgtggctggtggtattaggagcacatttagttgttggactacagataatgtgtttaattttatacaagttgagttgatggtgcatgtggagcatccaaagacaaaggtattagacagttggatatgagagttggagagaattctgggccagtgataatagaattacaagtcatggaggtgtgaatagcaagtggttaattctgtgatgtggtgagatccagtaggaagagtgggtagaggagtgatttctaacctttttgtaatctttagaaggtgataaaagctatggctatctctctccagaaaaatgcacgtttgccacatatacatagggtgtatgtgtagttaggggggaaatattttactaatcctgcgaggtccgtggttaaggactccaggtttagagtggaagttaatagggtcaaatccacaatgctgggaaacaccatcatttaaggcagtgttactgaatatatgagctgagttattatgcctgtgtcaaaattacatgggctgcttgttaaaaaaaatacaggttcctgggactcatccaaggttaatgaattacgctctcttggggcgggatttgggactctacatttttgaactgcctcaagtgctttttaagtgtgccttaaaatttgagatccactgacataaagggaaagcagaagaagaggaatctgtgacagaggcagagagggacttgcctgagttaagaggaacccagaggccggcgcggtggctcacacctgtaatcccagcactttgggaggccgaggtgggtggatctcttgagctcatgagtttgataccagcatgggcaacatgacataaccccatctctacaaaaaatacaaaaattagccaggcgtggtggtacgcgcctatagagctactggggaggctgaggtgggaggattgcttgagctggggaggcggaggttgcagtgagctgagatagcaccgctgcaccccaccctgggtgatagagctagactttgtctcaaaaaaaaaaaaaaaaaagtaacccaggaagaggcctactgtgaaagtaaagagatttttgagaaagtgaagtagttggcagtattagaacctgtgattcaagacagtggtctaagaagagggaagaggtaaagtaaaatataaactgaaatctaggctgagtgtggtggctcatgcctgtactcccaccactttgggagactgaggcaggagtatagcttgaaaccaaaagtttgagaccagcctgggcaacaaagtgagaccccatctttactaaataactgagatcccatctctactaaataaataaattaaaacacaaaaattcttagctgggcatggtggtgtgcacctattgttctagctgtttgggaagttgaggcagaaggagtgcttgagcccaggaatttgaggctgcagtgagctatgattgcacgactgcactccaggctgggtgacagagggagaccctgtctctaaaaaaatgaaaacaacaacaaaaaaacccagaactgaaatctgtccattggatttagcaggtagaaggttaatagtgatctttcaagaaaagaggaaagaaaaggaaggcagtctagcactcacttgaggtgagctagtctccctgactaggtctcccgtgaggaagcatgccagatggaaccactccttaaggagtatttgttgattttaatgtattggtgttagcttttgtttttaaaaacctttaaaagttgcagaatgaaaatataaacatatataatttaaatgatgtttataaagcagatacctatctagccactccctaggtcaaactatagaatatgaccagtatcccacatatatccctctctgatcaaaatgtctctgatcagaatgtccctgggaggtgactgctgtggtcattgttgccttagttttccctttttttttttttttttgaggtggagtgtcgctctgttgcccaggctggagtgcagtggtgtgatctcaactcactgcaacctctgcctcctgggttcaagcaattctcctgcctcactgtcctgattagctgagactacaggcacgcgccaccatgcccagctaattttggtatttttagtagagatgggggtttcatcatgttggccataatggtcttgatctcctgacctcgtgatctgccctcctcggcctcccaaagtgctgggattacaggcatgatccaccgcacccggcctaattttgtatttttatagggatggggtttcaccctgttggccaggctggtctcaaactcctgactcagatgatctgcctgcctcggcctcccaaagtgctgttttttttttttttaattgtctttttgataattccactatttttttttttttttgaaaagtctcccatgtctacctctttccacacagacacggcaaccatccgatttctcaatcttttccccaccttttcccgctttctagtccacaaaaccaccattgtcatcgtggcccgttctcaatgagctgttgggcacacctcccagacggggtggtggccgggcagaggggctcctcacttcccagcaggggcggccgggcagaggcgcccctcacctcccggacagggcggctggccgggcggggggctgacccccccacctccctcccggacggggcggctggccgggcagaggggctcctcacttcccagtaggggcggccgggcagaggcgcccctcacctcccggacgaggcggctggccgggcggggggggctgaccccaccacctccctcccagacggggcggctggccgggtggggggctgaccccccacctccctcccggacggggcggctggctgcgtggggggctgacccccccacctccctcccggacagggcggctggccgggcagaggggctcctcacttcccagtaggggtggctgggcaggggcgcccctcacctcccggacggggtggctggccgggcagggggctgacccccccacctccctcctggagggggcggctgccgggcggagatgctcctcacttctcagacggggcggctgccgggcggagggtctcctcccttctcagacggggaggctgggcagagaccctcctcacctcccagacggggtcgcggccgggcagaggcgctcctcacatcccagacggggcggcggggcaaaggcgctccccacatctcagacgatgagcggccgggcagagacgctcctcacttcctagatgggatggcggccgggcagagacgctcctcactttccagactgggcagccaggcagaggggctcctcacatcccagacgatgggcggccaggcagagacgcccctcacttcccagacggggtggcggccgggcagaggctgcactctgggcactttgggaggccaaggcaggcggctgggaggtggaggttgtagcaagccgagatcccgccactgcactccagcctgggcaccattgagcactgagtgaaccagacaccgtctgcaatcgcggcacctccggaggccgaggctggtggatcactcgcggttaggagctggagaccagcccggccaacacagcgaaaccccgtctccactaacaaaatacgaaaaccagtcaggcgtggcggcgcgcgcctgcaatcgcaggcactcggcaggctgaggcaggagagtcaggcagggaggttgcagtgagctgagatggcagcagtacagtccagcttcggctcggcatcagagggagaccgtggaaaggataattccactattacttgtcttttggggtttgtttttattctctctttgagttttgtttccttatgcgcccagttacttttgaaaatgttctgggcagatttgcctagattaataaatgccctccatgttccaattacttttttttttttgagacagtgtcttaccctgtcaccaagctggagtgcagtggtatgatcttggctcactgcaacctctgcctcctgagttcaagtgattctcctgcctcagcctcccaagtagctggcattacaggcacctgacaccacgcccagctaatttttttttttttttttgagacggagtctcgctctgtcacccaggctggagttcagtggcatgatcttggcttactgcaagctctgcctcctgggttcacccattctcccgcctcagcctcccgagtagctgggactacaggtgcccgccactatgcctggctaattgtttttttttttgtatttttagtagagatggggtttcaccgtgttagccaggatggtcttgatctccggacctcgtgatccacccgtctcagcctgccaaagtgctgggattacaggcatgagccaccgcatctggcctatttttgtatttttaatggagaccgggtttcatcatgttggccaggctggtcttgaacttgaacttctgacctcaagtgatccacccttagcgtcccaaagtgctgggattacaggcatgagccaccgtgcccggccccagttatttttatttttattttttgagttagagtctcactctgtcacccaggctggagcgcagtggcatgatctcggctcacagcaactttctgggttcaagcagttctcctgtgtcagcctcctgagtagctgggactacaggcacacatcaccacgcccggctaatttttgtagttttagtagagacggggttttaccatattggtcaggctgatattgaactcctgacctcaggtgatccacccacgtcagcctcccaaagtgccgggattacaggcttgagccatctcgcccggcctacttagatgttatattagtggtaattcctgttatcctgtgagctctttagtgtctaaacaattttttttaagagatggggtctcactgtgttgcccagttgcaatcatatcttactgcagcctcaaactcctgggtcaagtgatcctcttgccttagtctcccaagtagctaggaccataggtgtctgcccccacgcctggctgtttttacattttttgtagagatgtggcgggtgggggggtctcactgtgttgcccagactggtctcgaactcctgtcctcaattgatcctgctacctcagcctcccaaaatgctgaattacaggcatgagccactgtacctggtcttaaacaattttaaaataacatttttatccaggattttagttaattttcaacaggtggattagttcttgctgtattctcgtaaacagaagtcctggtttatttttatttgttttaaacattgaatcccatactcctccccaccttaccctacccagaatttagactgttaatgttttgaagccacagcctgcatcttaatcactattttatcttagtgcctggtcttagaaattatattgactctttgatagaccatatataaggcaggtggatgagaatgtgggtagctagttggaaaaggctgcttggtcatttgcttgattattttctcacacagtttttcctttactaagagaaaatgcccccatattggcaaacaaaatctccctgcctgagagcgcccagagtatagcagagcatcttaccctgatacgcctcttttcactctcttctctgtggagacagaaggagcttcaagagcagggggagatcagaatcgtccagctgggcttcgacttggatgcccatggaattatcttcactgaggactacaggaccagagtatgtgactgtgtgcgtcaggggtgctggggggagggcacaggttgggggagacagggaagttgggaaacagaaataaaaacaaaagaaagaatttccctgcccccacatcccatggagagggcacagggccctggtaaatagtaatatgagggagagagacaggagggaaagagggaggagtgagagggtaaagagggggggagaggagggggaggaggaggaaggaaggagggggaggaggagggggggaggaagagggggaggaggatgaagaggaggaggaagaagaagggtatgagaggtggaaagatctgagcaagaggtaagacaggaagagaaatgctgtcctgggggtggaggttggtagagagtgagggtggggatggaccatgtctctcatctctgcttgtaggtcctcaaggcctgtgatggccgaccgtatgctggggcagtgcagaaatttctagcttcagtacttccagcctgtggggaccttagtttccagcaggaccaaatgacacagacctttggcttcagggactcagaaatcacgtgagacttgtggaaccaaccaaagtcaggcatctggtgcttccctgcctccctccagttccatccagcctgtcctcctgtttttttggtgaacctgccagaaaagctgccaaaaagctgactcttctttttaataaaatgacccaagtttgtattcctccccacaagagaggaggcctatcttacctgggccttagaaagagccctgaaatagaattcagttcttggtggcttatcaaaagcacacaggggcctggcaggaactgtaaaagcttgatgttaatcatactgggactaagaggatagagaatggtaggagctgggatacccctaaacattcacattaaaacaaaaaaaacccaaagctaaaaaacaactgggcaggagctaaataaaaatctaattttgagaggctgtatctggctcaggcctcctactttgtaacccatggaatatgtgaaagcatttgaaaaactatagcactgatctcacatgggcagacacactctcagagagatgtggtgggagccatggcgcagtctgcctaggcagtggcaggagcgcagaagactctgattcctctcctcggtcctaagaccgaatgtgtgtcaggacatgtggtcagggaagagaagctatttaactgaaccagtaatagtagcaggaaaagaaaaagtggagggagggcagtccaggtagggggcctggaacaagcaactgcaccaacagaggcagttggtgcgagcacagaaccaccccaggctgggattttgttatccagtctctcttgcatggttgcccgtgtttctggagacttgtgtaaacattaatggatgaggaggagagatggttctcagagcccagccctcatctctgctggcttcccactgccctcaggcatctggtgaatgctggagtcctcaccgtccgagatgctgggagctggtggctagctgtgcctggagctgggagattcatcaagtactttgttaaaggtatcccatctgcagctcaagcctgcagcccctcaccttttggtggctcctcaggcctctaggccttattcacctttcccctttcctgtgccacttctctagggcgccaggctgtccttagcatggtccggaaggcaaagtaccgggaactgctcctatcagagctcctgggccggcgggcgcctgtcgtggtgcggcttggcctcacctaccatgtgcacgacctcattggggcccagctagtggactggtgagtctttccctggcctctggcagattatggagcaatgacccaaagtgggatttcctcccagctcatgcttagtttcctagtgaaggccagtggctctcattcttctctggaacccgggagcaccccttcccaagttctaagttctcctcacagcttgagcctaggcgtctggctccagccttgtctttctcctgcacagcatctctaccacttcaggaaccctcctccgcctgccagagacatgaagattctgctcatcattgctcagctcctcagagtgggccgggaggggactagaagagctgcatgatggtggctgagacagggtcaccttgggaaggcttgggagccaggatgagtgtcgggctctcgtgtgtgcaaaaggtcagatgtgactgctgctgtttgcctggtttctgacccagtggtggggtttgagcaatgcttctctgcccttccatggaaagtggaaccagaaatggtgccaaggctgtggctgttccctttcgtgtaaaatggtgctgttattactctgtcttgaaataggaaggtgggatttctggggaggctggtgaaggagggcagggttcttttctctacgtgtcatgttaaaattgccaaataaagtacctctgcctgtgatattttctggatgtcctttatttactgtgacgtgtgtttgggtgccttgtttaggggtagaggtgaagtctgagctttgcctcattcagagaggaaaggggtcaggggttcactctgacgttcaggccattctccctgtggagtggtgagggtgtacctaatctcctaaaccacggaatttctgttagggcctaaaaaagcaaaagcctagtatagttcaatttgtgttggaatgaaagtaagagacaagtgtcttagaagcctgtcattgttttgtgagggcctttaaatatcctgtactcgtgggccatgttgggcccttgtacgcccaggtatacatgagcttgtgtgcacctataccctgatacagatatacctggtagggggaggtgctcaggcactggaatgagaggagttaacggggaaggacagggttatttctgggccaagattcagagtttcccatggacacccaggtgtccggggtgcccccacaactctgggcctgaggccagttgcacttcttggctgtcacgtggtttcccagcttagctgggctgggggaggagcaaggtccagagtcaactctgccccgaggcctagcttggccagaaggtagcagacagacagacggatctaacctctcttggatcctccagccatgaggctgctctgggggctgatctgggcatccagcttcttcaccttatctctgcagaagcccaggtcctggaggcgggatgctgggtgcttggattggggcagggctggcatcgggacccgattcaggagtgagggagagcaggggtggaggtgtcagagcgaagtctgactgctgatcctgtctgttctccccaggttgctcttgttctctccttctgtggttcatctgggggtccccctatcggtgggggtgcagctccaggatgtgccccgaggacaggtagtgaaaggatcagtgttcctgagaaacccatctcgtaataatgtcccctgctccccaaaggtggacttcacccttagctcagaaagagacttcgcactcctcagtctccaggtaaccagaccccatgccctcctgctgcttgtgggggcctcctgccctgttcccatctgtcttgtaagtgtcatcatcttcccactggcctcctcccctcctgtcttcccaccctggcattctccttccacgtttctcccttggtctctgtcctttttggtcagctgtctcttgctctgtgacccgctccctctccctctccctctcctgacaggtgcccttgaaagatgcgaagagctgtggcctccatcaactcctcagaggccctgaggtccagctggtggcccattcgccatggctaaaggactctctgtccagaacgacaaacatccagggtatcaacctgctcttctcctctcgccgggggcacctctttttgcagacggaccagcccatttacaaccctggccagcggggtgagtctcagccccagggcctcaacctttaaccccctccgagccctctcaggatgagtttggtgccccctaagtgagataacctgaaagaaagtgccacacagaaggggtgcttaggaaacatttgtcccctgctccctctgtggagtttgacccaccctccccttgcacatggacccctgctcacctctctcctcctccactcccagttcggtaccgggtctttgctctggatcagaagatgcgcccgagcactgacaccatcacagtcatggtggaggtgagtccccgacctctggccttcctgatcctggccactgatgtgacctcctgcctgtgagcacttctccccttgcagaactctcacggcctccgcgtgcggaagaaggaggtgtacatgccctcgtccatcttccaggatgactttgtgatcccagacatctcagagtgagcgctcccaatgtgggggctgcccccaagctacaccaccccaattcctgttaggctctccacctcccacacagaggcacgtccccagatgccctgaccctcagcctcctgagcctctggttaacccccacagtcctcttcccagggaagcaggctgctggctctccgtgccccactgtacagatgggctgagccccttccttgtccattctcaggccagggacctggaagatctcagcccgattctcagatggcctggaatccaacagcagcacccagtttgaggtgaagaaatatggtgagagctggaaactggagggacaggcagctgctttcctgaaggaaataagggtggaaggagaggtactgggagcagctcagggcagggagatatgggtgccacagccctgagcagaggggagtctttgagctggagtctgacctgcctatcccttcaccctgggtcagtccttcccaactttgaggtgaagatcacccctggaaagccctacatcctgacggtgccaggccatcttgatgaaatgcagttagacatccaggccaggtaatacctccctccccacctctgcccaccagcaccgggtcctgctccctactcagtatgaatgggctcctgcttccctgccctcgggccattattccccccagcccttggcccaccctcttctctctgccacgacaggtacatctatgggaagccagtgcagggggtggcatatgtgcgctttgggctcctagatgaggatggtaagaagactttctttcgggggctggagagtcagaccaaggtaggaaggagaataggggctggggaggggaaggggcaagggaggtgaggtgggagactcagtctcaccctatgtcctgtttctttctatgccccagctggtgaatggacagagccacatttccctctcaaaggcagagttccaggacgccctggagaagctgaatatgggcattactgacctccaggggctgcgcctctacgttgctgcagccatcattgagtatccaggtgggtgactttcccttattgtaaccccagacccttgcctctgacctctgagctaaccctctgtcctccggcaccaacaccaccccacttctcacatctcatctcagactcaaaaccaggaaacacccaggagacctggtttctctccaactctgtctctgtgactcggcccttttccctggctgagtttatttatttctttgctcgttctgctcattccttcactcctccagtggacatgtgttgttcaatgccccgtgctaggcctcagcatgcacagacatgttggggaccagcctcaacgccacccgtagggttcctgaagtccattggtgacacaggaatgagaagagacaggttaagagttcataaagagtgggggccagggggccaattgcaaaatggaggctgcaaaaggctcagagctctggtctccacactattttttgagtacagtcactcagatctaagaagcagatgttcagggagaaacagtgaaagggaggcagtgggtcataggcgtaatctatagcaatagagttttaaatgaatctcctttgtgctcaaacagcatgtctttaaattatcggagagtagctggtggaagtgggcttagctaggagactgcatgtctgtccaatgcttcaaaggagggtctttctccttgaacacagtgtttacagataagacagggggtctcactctgagcatgggaacatgatggcaattaggaggcttttcttctcagaggcctcttgtggctttccacaatttattgtctcatatttttatggccagtttatacaggcaccccacaagtccttttcccaacatgcccccctccctttttttttttttaaccgctattgctattatggcttatttgtggtgtttggtctgttttcagaagtgtcttttgcatctgtagactaaaagtaaacagcataaacagatacacattaaagtaaaatttgtaatagttgatcatttaatggtcttaatctgtttaagaggatttatgtttgaaagtccgtcagtagctccaatgagaatgtcagtctcaggcaggagggttaaatgagcctgagatgctttaaaaacctgtttttttaaaatttggttatatttaatgttaaatttttatttttttcttttagatgatgtctaactttttaaaaatgatgtttagtagtattatacgaatggggagttatgtagaaattggaagtatttcaattacattgtacttctaattgatgttttaagtttattgtacgatcttccatttaaataacagtctgtctaagatcatttgtttgatttgtcaattgttggtctatttgggtctgagaattccacaattttgaggaattttttgttaactatttatatattttgtagtttgaacagaggagtgtaaagcaattccagcagccgcagcagtagctgtgactgcaataaggcccataagactgttataagggtaaaaataaatctctttgttttggtaaacacttttttttaaaacatttttgtgacaatatgaatggaaggagaggctttctaaggtctattgagggaaaccagtatccaaactcctttcttagtttttatcagtaacacagatgtttttacaccgaacgtggaattaatacaggtgaaaaggtgacagttttgacaagtaatagtttgagaattaggtcgaatgtcaatatttttgaccattaacataaaaggagggttgacacaactctgaatgggcactgttttgttggaagaaaactgatacgcaaattgaagtttttaaccttttttttttaaagataatatatttttttctaaacttaaatatgagattgggccattattaactttcataatttggagtgtttagggcctattattggattaattattttgggatgtgggccagctgtactaaaattggtccaaattatgggaaaatgagcacgtttttcagtgtaagtagtgttacctttttgatagtatagtttctgttttagttttgtcttgtatttattattttgatgggtacaattaactgtaaaggtcccctcaggggaccaattaatgacaatttcataggaattattttgtagtaccatagtgtgatcagagatgtaattttttttaattaatatttttaaattatttgaccattgttaaggttgttggcacctcttttttgggggcttaaactgttaattgaattgaactctgtgaatgatccgggctccatccagaaaataaatgataggatactggtctttgattatgacctggaattttaactagtcaatgttgtcggtagccttttaggcaaccgatagttggccttatgtaaagaggggggaactgataacctatggacacatttattaacttttttttttttcctttgggtgagagggcccatgagtatttgtaggcttagggatccaaacgctattattaacataaacttcaactgggggttttaaccatgtgacaggcctaattaaaggcaggaatgggacacatgcccaataggtataattttgggctgttgtagccacaggtttgttaggcgaggaggtcactgtttttattttggctttgtattctaggattagtaaataacagaagacaaacatgagtataattagtaacttttttttttagtaaaagagtgacctgtagtgttacttggcatcttagtttactatatgttattaatgaggaaccccactgggggtatgttaatttattctagctaagcagttatgttattagaagctgagaagggggtgtttgttaaagtaacagggcagaagaaaggcggatttaagatacgagcttaatacagtgtagcaggtataggtagtaggcaaagtgagagaattaaaaatgaataaattatttggcttagacttttgtttttttagtataatgtctgaggcctgtgttgtttgtggaagtcgcattgttgaggctgtagttcctgtagggtcttttttaggctggttcaaatttttttttattttttaattttttatcctttgatgaggatgtagtctttaggctggtactggaaattttaggagtggcgtctgtgttaagagactttttacaatttttaaagagcaggttagtgttttaagaaaaacttgtgttttattttaatgtttagtttatagaaaactggatgatatctttttaactttagtaaatacgtttacacacggaattttttacaattatcattttaaaacttgtttagatctttaaaacaaaattaaacaaccttttttgtataaattttttataactttttttatgacttttacagacaatttttaacatgtcttaactttttatgttttataatttttttactaaaggtacatttttataactttttaaatttttttactttttttgtatttttttgatttttgtcttagtcttttttttacttttatttttttaaatgtgtaataattagatgagtgttggtaacaatggatatatgtacatattttagtttttaaaatttagggatgtgtttaacatctgtttgccagaactgactaggttccaattctttacggttaacacctattgaaggagggtatgtgcctgtgagctggtaatctgggcattgtgggataatttgtttagccagcctctgtgtaagttgaaattatttagataagtttctccaattttggtggaataatcgatgtgattgggtggcttggtcaagcagtgatgtcataacctgaaggtctgcttgattattgccgtaagccaatgggccaggcagagagctgtgggctcgaatgtgtgtaataaaagtaggatgtgtaccttggtctagtaattgttgaagttgaagaaaaagaccacacagagtgggctccagagcaaacttaaggctgtaatagtttttaaataaatacacagaataaccttagctctctgaatgttagtaaattcagatcaagtgattggattatgtggtctccaccagactgttgctttttcatgtttaccagacccaccagtaaaaacagctatggctccttccaaaggggcatcacaagtaatttttggaagaacctatgtagttaattttaagaattgaaaagtttttaggataatgattattaatacatccaacaaattttgttaaattaatctgtcatgtaactgagttaataaatgcctgtttaacctgatttttatttattggaactataatttttattgggctcagtgccacaaagtttaataattcatatatgagcctgtccaattagaattgccatctgatttaagtatactgtaagtgcttttatggtattatgtggcaaaaaggaccatttaactaaatcatcattttgaacaataacccccattattgtgtggttagtgtgaagtagggaacacaatgaattataaaggcaagtctgagtcaatcctactgacctgggcttgctgaattttgttttcaattactgataactctttcatggcctcgggtgttagttctctgttactgcgtaagttggtatttcccctcaatattgagaagagattagacatagcataagtaggaattgctaaattgggccaaatccaattaatatcttctaacaatttttgaaaattatttaaggttttgaaagaatctcttctaatttgaaccttttgaggcttaatggctctatcctgtacttgtattttcaaatactgaaaaggagtggttgtttgaattttgtcaggtgctataagtaattcagcatttgtaattgtcttttgcaaagattaataatattgaataagttggtctctactttttgctgcacaaatctggaaactgatctctaacaggctggatagttctgcctacaaaagtttgacaaactgtgggactatttaacataccctggggcaaaactttccaatgatatttggctgcaggttttttgttattaacggcaggaatggtaaaggcaaattttttgaaatctgcctctgctaaaggaattgtaaaaaagcagtcttttaaatctataataacaagcggtcagtctttagggagcacagtgggggatgggagcccaggttgtaaggctcccatcggttgaattacagcgttgacgccatctaccggactttttcttaattacaaatactggggaattccaaggagagaaagtgggtgaaatatatcctttttttagtagtttattttataaagcacccccaacttttccttagggagcggccactgttcaacccagacggggcgccgggtcatccattttaagggaaattgctccttcactgtaataactgtagggtgaacctgaattgccccatctccataatgaactgtgggtcgggcaataatgggcacggtgagccaagtctcgggctccctccccctgcacccactcggctgaggaggaggtggccattctggacattcctctacaggaaccgtgggctgaacaattttttgagtaggtttagggagactggggagattggcataaatcatcttcagactctcctttttgttagtactcggtagaggtggttcagagttctgattatcaaactcctctctctcctcctctgactcagcctcattatctgtctgaaaaggctccagtgctgcatgcaccaatgaccaaagcgaccaaacaggcaaaggaatttcctttccttctctatatgctcttttaaggtcctttccaactccttcttaatgttttaatttcaaagtttcctgttttgggaaccaagggcaaaattgttccatagcatgaaacaaatccataagattttccgtatcaacttttaccccaccatgcatgcttgaagagctgccgtaggaagctcaaatacgtggtgtacttactttcagtttttcccattgtgtccctagctttctctgggcgccccgcttacctgtagaggttaaaacttttatgtccttgggagtcctttgttcgttggtcctctgtttcacatgcttgagcgtttcctcaccagattcttttgggccccacgttgggcgccagaatgttggggaccagcctcaacaccacctgtagggtacctgaagtctggtggtgacaaaggaatgagaagagacaggttaagagttcataaagagtggaggccagggggccaattgcaaaatggaggctgcaaaaggctcagagctctggtctccacactatttattgagtacaataacttagatctaagaagcagatgttcagggcaaaacagtgaaagggtagcagtgcgtcacaggcataatctacagcagaagcgctttaaatgaatctcctttgtgctcaaacagcatatctttaacttatcggagagtagctagtgggagtgggcttaactaggagcctgcacgtctgtccacattccaatgcttcaaaggagggtctttctccttgaatacagtgtttacagataagagagagcaggtctcgctctgagcatggcaattaggaggcttttctcctcagaggcctcttgtggctttccacaacttattgtcccatatttttatggccagtttatacaggcaccccacaagtccttttcccaacacagacaggaatacggcagcctgtgccctgggagctcactgtcttgtgggagggaaccactcaagccactccccacttgtcctcctgtccctctcttcttgggctctgtcccccacctctctctgtcctttgtcttgcaggtggggagatggaggaggcagagctcacatcctggtattttgtgtcatctcccttctccttggatcttagcaagaccaagcgacaccttgtgcctggggcccccttcctgctgcaggtttcttccagaggggaaggatgagtagggaggatgtggtagttaggagggctcagggtctgaccactctcttttgcctgccctcctttacctgcctaggccttggtccgtgagatgtcaggctccccagcttctggcattcctgtcaaagtttctgccacggtgtcttctcctgggtctgttcctgaagtccaggacattcagcaaaacacagacgggagcggccaagtcagcattccaataattatccctcagaccatctcagagctgcagctctcagtaggattcctcggccccctgggagatggtgggggaaggggaggagggtgagctggggtcccaaggatccatggcctgacttggggggaaggtggggtacttggctctgagctactaccctattcgcacctgaccccctctccaggtatctgcaggctccccacatccagcgatagccaggctcactgtggcagccccaccttcaggaggccccgggtttctgtctattgagcggccggattctcgacctcctcgtgttggggacactctgaacctgaacttgcgagccgtgggcagtggggccaccttttctcattactactacatggtgtgcatgagctggggagtcaaggagggctggggtgcagggaagagccctctgggtggggctgggggggttcaaggctgaggctgtcccatgaagaggcaaccactcttgtccctcccattcttggcccagatcctatcccgagggcagatcgtgttcatgaatcgagagcccaagaggaccctgacctcggtctcggtgtttgtggaccatcacctggcaccctccttctactttgtggccttctactaccatggagaccacccagtggccaactccctgcgagtggatgtccaggctggggcctgcgagggcaaggtgaccggggtcaggagagatggcacttgtgccgagggggttgaggacagggtgattgccaacagggcatggatttagcttgggggcagtgaggataccgggactgaaggaagctctcccactctgaccgcccccacctgccgcccctgccagctggagctcagcgtggacggtgccaagcagtaccggaacggggagtccgtgaagctccacttagaaaccgactccctagccctggtggcgctgggagccttggacacagctctgtatgctgcaggcagcaagtcccacaagcccctcaacatgggcaaggtttgtccagaccctctccacagctctctcacccctccatggctcatccccctgcttccctgagccttgggcgcagcccctggatcccactgaggctccccacagtctcttccccacttggccctgtggtctccatctcctggctctgtatcctttcctatccccccatgtgctgccctctcacctgtgccgagtgctcagtcctgcccctcagccacacttggctcctagcattcctgcctttcttgcaggtctttgaagctatgaacagctatgacctcggctgtggtcctgggggtggggacagtgcccttcaggtgttccaggcagcgggcctggccttttctgatggagaccagtggaccttatccagaaagagtgagaacagagaaggaaggggagtgggtggcgggaagataaggaaggaggaagggcctgaggggaccagctggaagagtccgggcaggaagggctgggcaggggaaggggaggaggggaggaggccgagtgcctgacggctggactgcagcctttctctctaccaggactaagctgtcccaaggagaagacaacccggaaaaagagaaacgtgaacttccaaaaggcgattaatgagaaatgtgagttgcgggtgcctaggcagtagcttgggctctccacctgggatccgggttgggggtctgcctctctgcccctcggctccttgctgaacccacgtgtggtatttggggccagagatccgaattccgggattacgagtggaaggtgggcagctctctccagcagcctctcttatgttgctggtctcaaggggtcggggcgggggctgaggtgtatgtcctttttgtcctctcatgctcacccccacctggccctgcagtgggtcagtatgcttccccgacagccaagcgctgctgccaggatggggtgacacgtctgcccatgatgcgttcctgcgagcagcgggcagcccgcgtgcagcagccggactgccgggagcccttcctgtcctgctgccaatttgctgagagtctgcgcaagaagagcagggacaagggccaggcgggcctccaacgaggtgaggggctgggtggggctagggcacaggtggcggcgcttggaaaggcagaacggtcccctcctcactcccgtccaccgtggtcccccagccctggagatcctgcaggaggaggacctgattgatgaggatgacattcccgtgcgcagcttcttcccagagaactggctctggagagtggaaacagtggaccgctttcaaatgtgagagtgtgtgccggcccggccttttctctgtgctgtgtctcggggccagccggggtagacgggccttctctgcctttccctacacagattgacactgtggctccccgactctctgaccacgtgggagatccatggcctgagcctgtccaaaaccaaaggtgatgtcaccctgtctgggcctcaggtgaccccgcttccatttccctgtaccccagctccctgttccctttgctcttagtgtaggaagagggtccagtgatctggggaggtctgtgccagcgtgcagctggcgtgggccagagggcagaggcggactgagacagagctgggtcacccccacccctccctcctgtggccctgaagctttgatggcccctctgatctctgcccctgtgcccacgcttcctttccctcaggcctatgtgtggccaccccagtccagctccgggtgttccgcgagttccacctgcacctccgcctgcccatgtctgtccgccgctttgagcagctggagctgcggcctgtcctctataactacctggataaaaacctgactgtgaggccccatgggagcctgagcatacaggagttgggggagccagggcccagtgaggggtggggaggctaaccgggccaggactctggccatcctcgttttcctgccctcaggtgagcgtccacgtgtccccagtggaggggctgtgcctggctgggggcggagggctggcccagcaggtgctggtgcctgcgggctctgcccggcctgttgccttctctgtggtgcccacggcagccgccgctgtgtctctgaaggtggtggctcgagggtccttcgaattccctgtgggagatgcggtgtccaaggttctgcagattgaggtgaatggagcacccctgaatataagtccccgggcccctagctttgtcctccaccctcagcactctctctgctggccaggccaggggcccaacacccgaaccaatgccttggtctgttcccatcttctacaattctgatccaactctgtccctggagttgaaactcaaagttctgggggagtctgcgctagcagggcaggctgtagtcctgtgtgacctcacaaccatgttttccctgagacagaaggaaggggccatccatagagaggagctggtctatgaactcaaccccttgggtgagtgaccctctacctccagccattggtttcctaagtgggtacaggtggtgggggatgtggacagcaggacaggctgccaacttcccccatttccccagaccaccgaggccggaccttggaaatacctggcaactctgatcccaatatgatccctgatggggactttaacagctacgtcagggttacaggtgggagtgccctttagtcccttcccagtggccaccttcggattcatgtgggacctgtggatccctgcttggtcccactccccgtgagcctctgacacagagtcctcagacctccaccctctccctcccatgtagcctcagatccattggacactttaggctctgagggggccttgtcaccaggaggcgtggcctccctcttgaggcttcctcgaggctgtggggagcaaaccatgatctacttggctccgacactggctgcttcccgctacctggacaagacagagcagtggagcacactgcctcccgagaccaaggaccacgccgtggatctgatccagaaaggttctgggtgcaagggcaagcaggaggggggccaggaaaggacagttactggaagatggacagcccaggaggctacagagggaaagaaagggggcccctgatgaggatggggagcatggccttgggctcaaacagcagaagggtgagtgtcacctgagcggccacctctcctctccaaggctacatgcggatccagcagtttcggaaggcggatggttcctatgcggcttggttgtcacggggcagcagcacctggtgagcttgggagagtggttccagggttctgagggggtcagggctggggcaggggtgggacagagctggtatgatgggagggtggataaccaggcacctgggggcgtgggcataatgagaagcaagtccttatccccaaccctcctttcctgccctccaggctcacagcctttgtgttgaaggtcctgagtttggcccaggagcaggtaggaggatcgcctgagaaactgcaggagacatctaactggcttctgtcccagcagcaggctgacggctcgttccaggacctctctccagtgatacataggagcatgcaggtgcgggcatgctggggctggcccgagaagcgcctgtcggaggactctctttgccccttccccctcctgtttgacatcttttctccccttactaggggggtttggtgggcaatgatgagactgtggcactcacagcctttgtgaccatcgcccttcatcatgggctggccgtcttccaggatgagggtgcagagccattgaagcagagagtggtaagttcagtggcgtttctgccctctgctggcccccagctctctccctttttcctcaggaacccaggggtccaggcccaagaccctcctcccgttttcttccaggaagcctccatctcaaaggcaagctcatttttgggggagaaagcaagtgctgggctcctgggtgcccacgcagctgccatcacggcctatgccctgacactgaccaaggcccctgcggacctgcggggtgttgcccacaacaacctcatggcaatggcccaggagactggaggtgaggggtgaggcgctcctggcagtgagcctgaggcccaggggaccttaggatccctgagtgtgcccagagggagaggctggatgaagactcagaggaggaatgaagttataagcaggggtgggttgggggagactcaggagagcccagcagggggtggctaagggccaggggaccaggctcttctccctgccttcctgtttactcgtggtctcccttcactttcagataacctgtactggggctcagtcactggttctcagagcaatgccgtgtcgcccaccccggctcctcgcaacccatccgaccccatgccccaggccccagccctgtggattgaaaccacagcctacgccctgctgcacctcctgcttcacgagggcaaagcagagatggcagaccaggctgcggcctggctcacccgtcagggcagcttccaagggggattccgcagtacccaagtaggggccgtccccgggctctggcgggggtgggtagtcctcagaccaagggcttgcttgagtcctggctcaacctccctaggacacggtgattgccctggatgccctgtctgcctactggattgcctcccacaccactgaggagaggggtctcaatgtgactctcagctccacaggccggaatgggttcaagtcccacgcgctgcagctgaacaaccgccagattcgcggcctggaggaggagctgcaggtgaaccactccctggtgaaccactccctcgcctgggtagccaggacacctgggcctcgtggccaggccagaagccgtccccaacctcccacccgtggaatccccgcagcacttcttcctggggtcttcgggggaagactgacttcctggctgcgtgacctggagctctgagcttcagttttctcacttgtagagtaacatacacagagttcaccctacagggtcgttagaaggctgaagtgagataattcatgtgctggtataaactttgtggaaatgtgaggtggggagaggaggtggggctgttttgaggaaggagataagttactggagccgcaaaaacaggtttgcttgtgcccttctaacatcgccttcccttttctgttgctgaagttttccttgggcagcaagatcaatgtgaaggtgggaggaaacagcaaaggaaccctgaaggtgagggccagggaaggggtggggccaggcactggtggaggagagggtgtggagtgagaggcctgtgggcagaggcacatggtccggggaaggaggcagacacctcagggttggtgtcccgtgcttccgtcctgggtgtttttccccctgcttgctttcgcttgctctccccatctctgggtacctgttgtttcctttacccgcctcagtgctggtggctccgaatcccactcctcagcccaggcctcttccctgaaccatgggccccactcgtcccactcccacagcacctcagacgaggcatgtcccaaagcccttcttcattctgtgtctcttgtctggctggtgggagcccctcccagccaggagcccagccactactctagaggccgtgttagtggcccctctcccaagcctgtccttatgtccctagtgactcctcctctgctcccctgctgcctgtggcccttggtgctgcatcctagattctgtgctgagacggccttctccctacctggaacttctctctacctcctgtctcccctgtctgatccactgtccacacggcagtgacactgaccttccaaaagccccagccagatcagccttggggaaaagtcactccccgctgcccacggctcagatggctgggcctctgcccacccctccggccagacagctctccttgtctacacagatccccttgcctttcctgtccttccctgcttcttggcccacaggacaagctctttcttctccttcaagccttggccagaagcctttcctgagcttttcagtccagcctcttcccagcacagtctggagtgttggcctctgggggcaggcccctgcttctttacctctctgtctcgcctgacgcctgtggcgaatgtggtgccactcgtgtgtgtggactgtgcagtgacggggaggaaaaggggctgaaggcctcaaatcccgtagcccagggagatgcccttaggtatggcaccagagaggtctgtggcctcacatgtcccacgtcctctccctgccccttgctgagccaggtccttcgtacctacaatgtcctggacatgaagaacacgacctgccaggacctacagatagaagtgacagtcaaaggccacgtcgagtacacgagtgagtgtgggggttgggaggccttggggccaggcaggggctggcgcagggagccgggtggccatcccagccctcctcacaatgcttccctgtgcagtggaagcaaacgaggactatgaggactatgagtacgatgagcttccagccaaggatgacccagatgcccctctgcagcccgtgacacccctgcagctgtttgagggtcggaggaaccgccgcaggagggaggcgcccaaggtggtggaggagcaggagtccagggtgcactacaccgtgtgcatctggtgggcgccgggagctgccctgggccaggggagggagggcaggacccaggctggggctgggcttctggagcccgcgcaggcagaacctggacgacagctcacacgtctccacaggcggaacggcaaggtggggctgtctggcatggccatcgcggacgtcaccctcctgagtggattccacgccctgcgtgctgacctggagaaggtgtggtcagccacccagggcaaccccctctgtcccaggtactgagccctgtcatgtgcagggcctgtgaccaactccccttttccacagctgacctccctctctgaccgttacgtgagtcactttgagaccgaggggccccacgtcctgctgtattttgactcggtgagtggggagagatgaggcaggaagggactcgatggcaccgggtttactgagtatgcgttaggaggtttctcaggagacagctgtgtcagcggctggtgctcttgagaacttgtgatgtcatcagagagaaggacaagaatgtgagcccgtgagacacagcagagtaaggggcagacctgcaggcggcagggaccgatgccagtcagcagggaccctcagggtttgagagggagtctttcctaatgctggttttattcagcttgaggggctgcctttgtttttttgttgaacttcctatcttttttttaatattaaagcgtattttcctttacaaagtgatggtggccatagatgatagttgtatttgtcttttcacgaccttatttggctaaaatagttatcaaccctcttacggctctcaaaacatttttatttatttatttagtaaagacagggtctcgctctgttgcccaggctggtcttgaactcccggcctcaagcgatcctctggcctaggcctttcaaagtaccggatttacaggccagagccaccatgcccggccttcaaaaaaagttttggaacatttactgtaacctctgggagaaaatgtgagaaaggtgtggtggctgtcattagccagctgtttgtaggtcagggagacccctacccagtgtgtgcagaggggccagcccccatcagctggggaagcctggctgacacatctgggttgaacacaatagaaaacacagagccaacaagattcccggatagggagctgacggtgcagcagcctagctcaggagggacactggcacggcaccgtgtggactgggcccgcgtgggcacgaggaggggtcaggcctgggacctgagtcggggggtcaggcaggatgacagaacctgcagttaggttgtggcaaataaaggaggacccagtggtatccatgacaaagatgaggccgcgaggagggcgagtgggtttgggggcaggcagagtgccttggagaacttacaggtcctgccacaatcctaatgcaaggatggagctgcaagttcagtttgggaatcatcagcctggattggtttggtggaagccagggagtggttgagacccccacaggggagctctgaggaaggaagttccgaaggagggaacgtaagaaatgaccaggtcagaaccaagggtggtccagaagctaacccttagcttagggacagtttcacagagaacacgtccatgatgcaagactctgctgagggcctggagcagtgaagactggggcaaggtcaccctctgggaagtgaagtcaccagagaccttgcggagcagctttgagagttctctgagtaggaaggtaacagaatgtgaaggacactggagagaaggccaataggaagcaaacaaaaacaggccaaggaaacccagtacagggggctgcagggcccagggagtgggtccctcatctctcctccccacgcttggccaggtccccacctcccgggagtgcgtgggctttgaggctgtgcaggaagtgccggtggggctggtgcagccggccagcgcaaccctgtacgactactacaaccccggtgagcactgcaggacaccctgaaattcaggagaactttggcataggtgccctcctatgggacaatggacaccggggtagtgagggggcagagagccctggggctccctgggactgaggaggcagaatggaggggcctgtgccctaactcctctctgttctccagagcgcagatgttctgtgttttacggggcaccaagtaagagcagactcttggccaccttgtgttctgctgaagtctgccagtgtgctgagggtgagactgagggcctggggcggggcagtggaggcgggatggccggggccccccccacactgtctgatgggttccccaacttcagggaagtgccctcgccagcgtcgcgccctggagcggggtctgcaggacgaggatggctacaggatgaagtttgcctgctactacccccgtgtggagtacggtcagtcttcccaccgaggccctggcctgaccctccctcggggaccggctgttttggtctctctgggtgtagcctgctcctcttacaggtcatgcacgcagcctgtttgctctgacaccaacttcctaccctctcagcctcaaagtaactcacctttcccccttctcctcaccccctcttaggcttccaggttaaggttctccgagaagacagcagagctgctttccgcctctttgagaccaagatcacccaagtcctgcacttcagtatgaagcaaaccggagaggcgggcagggctggggggagacagggaggctgaggtgtggccgaggacctgaccatctggaagtgtgaaaatccccttgggctgtcagaagccttgggcttggccataaatagggaggcagtggcacctctccatgggggtggcgaaggtggaatgagaggatctacacagagtccccagcctgggctcaccctgcaccttctcttcccctctgaccacttttgcgcacgtcatccccgcagccaaggatgtcaaggccgctgctaatcagatgcgcaacttcctggttcgagcctcctgccgccttcgcttggaacctgggaaagaatatttgatcatgggtctggatggggccacctatgacctcgagggacagtgagtcatctggtcccctcagtctcttgtcctccccatgcctcgccacctaggccttgcccctcagaagccagatgcctgtgctctccgtttccacctgccatcctcccgagccctgctgactgcccctttgccccctgcagcccccagtacctgctggactcgaatagctggatcgaggagatgccctctgaacgcctgtgccggagcacccgccagcgggcagcctgtgcccagctcaacgacttcctccaggagtatggcactcaggggtgccaggtgtgagggctgccctcccacctccgctgggaggaacctgaacctgggaaccatgaagctggaagcactgctgtgtccgctttcatgaacacagcctgggaccagggcatattaaaggcttttggcagcaaagtgtcagtgttggcagcgaagtgtcagtgtgtgttgctagggctgagagcagtgcccctgcccgatgcagttctgggcaggccaggttgacataaccttagactctctgagccctgatgacccttgggctgttcagctctgctagaacctcccagatgacccgctaggagtctagtgcttcacaggaccaccccgagcagaactgggacccaagagcctgcaccccaaggaccagagtccatgccaagaccacccttcagcttccaaggccctccactgcccggctgtcgccagtcaccacggcctcagacagggcttgtgctcagctgacacctgtgacacagctcttctgcctcatgagctgttgtccagctacacctccccgactctgtcctcgtgctgctggcggttctgaggtctgcagattttagctgagttccgggctgttgaaagcctgctgacgcttggttctgttatcagtggaatgaggtgactttcccggagttgtgcaatcctcaggtccggcagtgtcttcttccagttactggtttcaaacaagccaaaagtctgactttggtgtgtttgtgaatcctctgaggaagccgctgttctcctggggtctccccttcccaccggacctgcctaactttcccccatttagtggcacacctggggtcttcagagatgactccgcgtctgtccaaagaagtttggtgagatcagtttccgtagaggtcatgacagttcagcagcctgccatccagtcattcgacagaaattcgggaatctttcacttcatgccatgccctgtgccaggtgccagagatacagctgctcactccagggctcatcgctggggagacagataagaggacgggcagtccccaccctctgtgaaagatgtgatgtcagggagcagtgtggtcctgtggggcatctaaccaagtcaggggcattgccaggcagggacagggaaggcttcctggagcaggtggcctccaagtggggctctgaagactgagaaggagccaggcaaagagcaggggtagatgagggcatctggggcagaaggagaatatacaaaggcccagaggccgggggcaggacagggtacctttggggacattgcatgtaattgaccacattcggagtttggatttggaagtggtggaagagatggagatggtgagacaagtagtaagcacgtcagccttccaggtgcgctcctttccgatgagcactgtcttatcccacgtaactttgagaagtttgggcctttcccactgtggcagaggtttcctgaggctcttgcatacatggccctatggttgctcatcagatctttctcccagtagctgctcagcatggtggtggcataagcccattttccggagccagggattcagttgcagcaagacatggcccggtctgggaggtcaaccatgaagaaggcagtagctgtcattgcccaaccccagaaatcccaatcctgttttctccctctcagtcctgatcatggattcagcagcagcgaactcgccaatgtagtgggtggcacagccagggtcttgactctggctctgcagtagcacagtctggaaaagctctgaggggagagagacccccactggtccgagggtctggcacagagccagaaatgggggggaaggtatggggctgggtcgcctctgacctctcaggtaccatccaggaggccctggcctctcactgaaccctgccactcctctttggcatggcctcttcccaaatccccaaactgcctccttacccacaaaagtggtctctgagtgtcagtccagtgggacccccaccccttatggcttcagttccccaaatagggctggacccttgatcctgatccagctgtggctatccagccccttcctggggactttggactttgaggggggcatgcccagttgtgctgggaatccatactttccctggctggagtagaacctgtggactgtagtcctgagggcagtcatgttctgcctgtgcctggaaacacaagaaacttgactgcagagagaagaaagaggagagaggaacagagcgaggaaaccgcccgtctccggggctttttctgttccctatccttgactttctaagaccagtggggtcccctcctctgcttctttttcctgagttctgtgaaattccccaattcttattttttatctcaaaccagctcaaggtgggctgttttcctttcaaccaaagaaaggtgctcctggtggctaaaggtacatattcgacagctagatttccaggctggaatcctgccctccacaacatgcgaacaatacccgtgttgcatatagagcatggctgtgaagagttgagtgagtgcccacaaagcacttagagcagtgtctggtacatgctattactccgcagcgggaaaccacttcctcctttgtcttctgggcacttttgtgagtgaagggaggcactaataacaatcacactgggatacctgtatatactggaatgccccaggcaaaccaggcttaaactgtattactctatctgtagcttaaactaacaaacaacccacacaaatcacattttgttcttcaggcgattcaggaaggcctattaggcagggactgccattttctctctgagacaaacatcatgccagtaaactggcccacggtggggtggcagagggagagggcccaggtgggggcggacactattgcctgcacagttgatgtggaaccagaaagctgactctggatgcaggaaaaaggtcagggttgcatttcccttccttgcttcttgatgggtgatcaatttttttgaaatacggacgtcccaaggccaatgagactggtgtcattccagaaaagggccactctgtgggcgggtcggtgggagggtacctgaaggtggggtcaagggaggccccaaaacagtctacacagcaggagggatggctggggctcttgagctataagtggcacctcagggccctgacgggcgtctcgccatgctgctcctgggcctgctgctgctgctgcccctgctggctggcgcccgcctgctgtggaactggtggaagctccggagcctccacctcccgcctcttgccccgggcttcttgcacttgctgcagcccgacctcccaatctatctgcttggcctgactcagaaattcgggcccatctacaggctccaccttgggctgcaaggtgagaggctgatctcgctctggccctcaccataggagggggcggaggtgacggagagggtcctctctccgctgacgctgctttggctgtctcccagatgtggtggtgctgaactccaagaggaccattgaggaagccatggtcaaaaagtgggcagactttgctggcagacctgagccacttacctgtaagggctgggggcattttttctttcttaaaaaaatttttttttaagagatgggttcttgctatgctgcccaggctggtcttaaattcctagtctcaaatgatcctcccacctcagcctcaagtgtgagccacctttggggcatccccaatccaggtccctggaagctcttgggggggcatatctggtggggagaaagcaggggttggggaggccgaagaaggtcaggccctcagctgccttcatcagttcccaccctccagcccccaactcctcctgcagacaagctggtgtctaggaactacccggacctgtccttgggagactactccctgctctggaaagcccacaagaagctcacccgctcagccctgctgctgggcatccgtgactccatggagccagtggtggagcagctgacccaggagttctgtgaggtaaggctgggctcctgaggccacctcgggtcagcctcgcctctcacagtagcccccgccctgcccgctgcacagcggcctgctgaactcacactgtttctccacagcgcatgagagcccagcccggcacccctgtggccattgaggaggaattctctctcctcacctgcagcatcatctgttacctcaccttcggagacaagatcaaggtgcctcacagcccctcaggcccacccccagcccctccctgagcctctccttgtcctgaactgaaagtactccctccttttctggcaggacgacaacttaatgcctgcctattacaaatgtatccaggaggtgttaaaaacctggagccactggtccatccaaattgtggacgtgattccctttctcagggtgaggacctggagcctagacacccctgggttgtaggggagaggctggggtggagggagaggctccttcccacagctgcattctcatgcttcctgccgcagttcttccccaatccaggtctccggaggctgaagcaggccatagagaagagggatcacatcgtggagatgcagctgaggcagcacaaggtggggactgtacgtggacggcctcccctcggcccacagccagtgatgctaccggcctcagcattgctatgaggcgggttcttttgcataccccagttatgggcctgttgccactctgtactcctctccccaggccagccgctcagcccgctcctttcaccctctgcaggagagcctcgtggcaggccagtggagggacatgatggactacatgctccaaggggtggcgcagccgagcatggaagagggctctggacagctcctggaagggcacgtgcacatggctgcagtggacctcctgatcggtggcactgagaccacagcaaacaccctctcctgggccgtggtttttttgcttcaccaccctgaggtgcgtcctggggacaagcaaaaggctccttcccagcaacctggccagggcggtgggcaccctcactcagctctgagcactgtgcggctggggctgtgcttgcctcaccggcactcaggctcactgggttgctgagggagcggctggaggctgggcagctgtgggctgctggggcaggactccacccgatcattccccagattcagcagcgactgcaggaggagctagaccacgaactgggccctggtgcctccagctcccgggtcccctacaaggaccgtgcacggctgcccttgctcaatgccaccatcgccgaggtgctgcgcctgcggcccgttgtgcccttagccttgccccaccgcaccacacggcccagcaggtgactcccgagggttggggatgagtgaggaaagcccgagcccagggaggtcctggccagcctctaactccagcccccttcagcatctccggctacgacatccctgagggcacagtcatcattccgaacctccaaggcgcccacctggatgagacggtctgggagaggccacatgagttctggcctggtatgtggggggccgggggcctgccgtgaaaatgtggtggaggctggtccccgctgccgctgaacgcctccccacccacctgtccacccgcccgcagatcgcttcctggagccaggcaagaactccagagctctggccttcggctgcggtgcccgcgtgtgcctgggcgagccgctggcgcgcctggagctcttcgtggtgctgacccgactgctgcaggccttcacgctgctgccctccggggacgccctgccctccctgcagcccctgccccactgcagtgtcatcctcaagatgcagcctttccaagtgcggctgcagccccgggggatgggggcccacagcccgggccagagccagtgatggggcaggaccgatgccagccgggtacctcagtttctcctttattgctcctgtacgaacccctcccctcccccctgtaaacacagtgctgcgagatcgctggcagagaaggcttcctccagcggctgggtggtgaaggaccctggctcttctctcggggcgacccctcagtgctcggcagtcatactggggtgcgagagaggtgggcagcagctcagcctccccccgctggggagcgaaagtttcttggtctcagcttcatttccgtgaagggcaccgagaactcgaagcccttccagtggtaccagctcactccctgggaaaggggttgtcaagagagagtcaaagccggatgtcccatctgctcctcccattccccttaaggaggtagctcccagcactcaaccaacctccccgcagagctcccttcctgaccctccgctgcagaggattgaggcttaattctgagctggccctttccagccaataaatcaactccagctccctctgcgaggctggcatgattgttccatttcacccagccactcagtcccttgcctgttacactgtggggctgaaacctaggcaggccgagccccagccaccccagctctgagccgcctccccacccctcacctgatggtccactgtgctcccgtagagcccgttgaggttggcgtagtggcagttcctgtaccaccaggcccctcggtaggagacagcgcaggagatgagcaagctgttggggtcccgatcacgggcagagaagacactgccgctgtggtagctcatggagtcccctgggcagggtggaggaaggagccatgagggcctcccctcccagcctcaccctcccagcctcacagcctctgcttacctgcggtgccgtggtagccctccaagtggaggcggtagtactccgcagccgagtctacgtggaaggagtcgtactgggcgaacacagcctcgtccccagcccgcaggtccacgcgcatggagtagtcacctgcctgtgtcaggctgtgcagggcctcattgcctgggggtgggatacgtgccctcatcagggtcctggtgtccacagggcccccatccccatccgtagttccccagtccctgtgaggcactgacccagccagaactctccagagatgttcccaaaaccatgggcatagtcctcccagtccctccagaagtctgtctgtccatccatgcggcgctggaacacctgggaagcaagtgggggcaccatcagcctctggctcccggggcaacagaccctgccctgcacagacccctgggcttcccaatgccacccaccagccagccgcccccatcagtctccatgtcgcaaaacacgttcaggggccgctcgcggttgccgttgaggaagatggtgctggtcctggaggcaccggctccgttctgcatctcctccccgcagtccctggggaaggggatccgcagcccacctgggagaggagagcaggggccagtccttttccaagccttaggccctggctgcccacccagcccccggccccgggcccgtgcgtccaggtacccgtggtgaaagaggtggacacgggcggcaggaggctctggccccacatggcctggagccgtgcattgtaggaggtggagggaaagaggccaaggagctggtgagatgtgatccctcctgggagcaggatctcctgtgggacagacaagggggggtcaggggagagggaggtggagaccctccgggagggccagaggcagcacctcctggaatcacccagggaggggagttgggtcagtggggccggggcacctggttctgtccaccaggggtgtggaagctgagcaggtagcctgcgggccggactgggggctcagtccaagtgagcagggcggtgcggggggtcacttccttggcctccaagtcccgaggggcctctagccctaggagggaaagcaggaagaggagatggggatgaggcccaacctggctccctctacctcctctccctgtcccacacaccccacagaccctacctgtggtgaaggtgatgctggctggggaagtgaggttggggccccgcaggccacgcactgtggcggtgtagttggtgtggaggacaaggtcatgcagggggtagtccaccgcgctgcctggggtctccgcctgcagaggcggggctgggagtgtagagaggggcatcaaggcctgccccctccatcctcggccagagtccagcctcccccctgcaatccccaccctgaacaagtcccctccagaggcctcaggcctgctcacccccaggggctgtgacctggacgtcataggtgtccacaggattctgggggggcttccagtgcagcacggcgaatccctcggtcaagttcagtgcacgcaactgtgtgggaccgtcaggaactgggggaaggggaggggctcagaagggtccccgcggctctctctactccgtgcctccccagactccactggcctcccgtccgcaatcggagcctccaccacctccctttcaccctcctcgttctctctcaactcccacccatgccgttttcttggctcccacctcttgccccgggtcccagtccatctcacccgtggtgaggaagcctgtgagaggctcactctcctcaaagcctcggaccgagaccacggtcacctcatagcgagcgcctgggatcagcccctggagtttctgggtccgggcctggccatccacctgcacactctgaggctcccctgaaaacattggggatcgagggttacccagggaaccccagggcggctggagggtgggcagagtgcaggggggagaggaaatgcgaggcgatgagcacatggcaaaggcaccacctccgtccgccagctggtaggagactttgaagctgtccgcccgggatggtgggggcatccagttgaccttggctgaggtctccctgatttcactgaattggaggtcacgggggctctccagaactgcagaggggtcaaggaacaatgacgcaggcaggggcagggaggcttctccctgcgagtccccccctcgcctctgctccagcacaggctcaccaccccttttcctctagtccccaggaatggaagtcgctctgcagattcctccaggcccaccaccaactcgcccacccccaccgctggctgaggcactaggtcccccccgtgaagtacaaagacccccactttggggcagagtgtgtgtgggtccttacctgggctgagggtgcgggcggttccctggatgctgtcggccttgtggggtcctcgcagcccatacagtgtcaggctgtacagagtcccggaacgcaggtcccggagcacggccgagtgccgtgtccccggcaccatcagctcgcgctgcagcagtggacgcggatgcggctccagagtgcttggtgatggaaccccaaagcggagcaggaaggagtcgaaggcccccggtggggcctcccagttgagcctcagtgaactggtggtcacgtcagtcacagacagctgggacaggcggggccttgactcctctgaggtctgaccagcaggagccagccctgcacggagtgggtgggggagaagggattggagacagaagcacaccagcttggtgacccagagcacgtcccttccacccccctccctgcccctgtttctctatctgtaaccagggacttgcagccacaggggggtcctgtggggcagagctaaaggccactcgcatccagcccatccatcctctctccctggtacccgcctcacgctctttccctgcgaccaccccttctgagcccccgtttctcccttctgagtcctaggctagaggccggagacgcctggtggtacctgtggtgccctcagctgagaggggccccaggcgcttcccttcatggaggccatagaggaggaacctgtagggggtgctgggctccaggcctgagatgaggatcttgctctggtcgccgtccacgagcaaggcctggggctgcccgttcgtgtcctcatactggaccacgaaggaatcaaaggggccctgggccacgctccacgagaggcgcatggagtctggggttgtgtcggtcacggtcagcactcctaggcggggctcttcaggaggctcaggggcctctggggctaactctggggctggtgtgtcctcttctggggctgcgtgggagaagcccaggggagaatctgagtgaggggcgccatggggtgctccatttttatcttccaggcttggcccaaggctgaggtgggaagtttataggtccaggcccagtcagacaatgaagtcgctgtggcctcgtgactcctgcgagctcccgcgctgtctgagtcaggtgctcgcttcccccttccacaccccggtgtcctgccgagcccacctcgagatatcacaggctctggccccacccatgccgggatacattcactgagcttgaggagtgtggtgctcccttctgagagaagctgagggtggaactggctggttgaggtgactggcaaatcccaccagccgtgccgtggtcaggcctgtctgaggtgggcatcagcgagctctggaagaggagcctgtaccacaaatgcagccactgctgttggtttctgtgtccccgctcattttgttttccagtgatgttcctcttaagaaaatgctcctgactcatccacggcagggaggtttgccgctatctggacaaggccacccttcggggaggcgacagcagccccagcgagtaatgaggagcagtggcagtgacggggcagagtcggggctgggagattagagagcccctcccagggcctttccctcccgcctggcctggctcctgctctggactccttgatggatgttgaagcccacagggctgcagactcctcctccttcctggggacaggccagggcgccccactccggcctgcccactcctgcagtcatctttgtcttcagcccaaatgcacaaggaaacccacacaagctggcttgctatagccaggcacagcagcctcacctgtcattcccagggcagagaccgggcccaggcgctttcccccaaggagcccgtagagcagaaacttgtatttcttgccaggctccaggtcctctacggtgactgtgcgctggtctgcggccacaggcactgccctgggctgcccgtccgtgtccctgtactggaccacgaaggagtcaaaggggccctgggctaccgtccaggacaggcgcagagagctggaggtctcctcagccacggtcagttcccccaggtggggaggtagctccttctccaggggagctgtgcagagggaggagggaaagctcttagtcacatgctgcctttgcctaagccctggcagcctcccggaggtgtgaggttctgggaaatggtccctccagtgtagccccagggacagctccttgaggagacacacaggcctgctcccgccatgccccacaggaatgagggagaacagccccctcctcctctggaggctgctgcccaaactccttcctgccccgccccttccctgctgtgatcgaggatgcgccaaattcattacagatcatctcccgagggatgggtggctgggggtgcagagagggcctttgtttaccctgacccccagcccctgagcaagaatgaggccagagctgagagagactccccggaggtctctgggttgtcacggagacaccccaaacatcgagagctggtctgggcagccggccaatgcacggctcccatcactgccaggctgtgatctcccccttgtccccttgtggccatcagcctgaacatccgtgcctcctgcttccccagccccacactgaccccactgggccggggcagccagggtggggcagggagaagacaggggattagctgggagaacagagggcagagcagaggcttgcccgggtggggctggggccgatgggtggggatctgtaccccgtccccacagtgagggtttgggaagagaattacggagtcccagggacccaggcccagactggccggctgctctgtcctcctctgggcatagtgactcatggtcctgggagtggggtgagggtcggtgacccaccacaccccttcctcagggagctgagtcataggcatagtgacaccaggtttttccatcgtctttccatagccaagccctcccttttcttccacccctcggctccgagtcagggaggagggaggaggatgggaaccactactgagtccagcgccattcccagcattatgcaggtgaggacactgaggtcccggggatgaagcggcttgtccatggtcaccctggcaaaggctaggactggaactggaacacagatctgctggccccaaagcccgtgtcccttttatttcctcagcagtcagcgaatgaaaggaagtaatgcatatgcttcagaactgtgcctgacacacagagggactcactttcggagttaagatggttgtgtcagggctgatagagggaatctcacgggaaggctgcagggccagctctgagggctcggatgagaggcagctctggaaaaggtggaggctggactgggactcacctgtggtgctgtcagcagagatggggcccagtcgtttcctgcctgacagaccatagagcaggaacctgtatttcctactgggctccaggccctggactgtgacctcccgctggttggctgccaccggcaccacctggagccgaccatccttatccttgtactggaccacgaaggagtcgaattcgccctcagggaccgtccacgagaggcccacggagtcaggggtcgcatctgtcacagtcagctcccccaggcggggagacggtttggtgtctggggctggaaaagacagtgaggtgcatggagagtgggatggaggcaaaggggccacggagcttcctgggctgctatggctctgtgagccggtcccaggaacgggagggtgactgggccaggagtaggaataaaagaggagccagacaagaaagcaagtgtcccctggggtgcagggaaagtagggagagggatgagtgtgagtgggagaggagagctcagggcctgggttttcctggacccaataaatcagtgggtgctgaggactggagtgtggggcacagaacgtgaaattccaacaggtgccacaagggggcgaaggctctggccgcgggaggcctccagccctcactcaccggtcctggcctccacagggactgggccgtggcgtttcccattctggagtccaaagagcaggaacttgtacttgcgggccgggtccagccccgagacggcgaccgctcggaggtctccgctcacaggcactgcctggggctgcccctgcgcgtccctgtactgtaccaggaaggagtcaaaggggccctgggccaccgtccatgagaggcccactgagtccgaggtcacggccgccaccgccagctcccccaggcggggctccaccggcagtggtgtgggcaggggcgctgaaaagagcagagcaggcccatgggtcaggaggcaggaccctgcgcaagggaggcagtgctctcccaggactggagtgagcatttcttagcggcctcctctaaaacgcttgttttagaatctgtgccctgcattgctgtaagcagctcacaaacagtggtgcatttaaccctcgcacaacatatgaagtgggtgccattattatcatcaccccaactttgcaggaatctgaagcacaaggttaggaaacgcctgcaaagtcgcacaatcactacattcgaaggcacatgcagatctgggcagctggatctgaagcactttctgagccactaaaatactccttaagggagcctgaagactaacaaatgagcacacgagcaacatggaggttccagatcacaatgggagaaggaagctacaacaaacagggcatggactacctgcccatctgactccacacagtctccatgaatccaaggatgaggcaggatcattagcaacatgggagaaaagacagaaacctagaggcccagtcaaaagaggtgccaagatccaaaggagaaacacaagggggctgcagaggtaaacctggggacgagggcctgtccccccactcacccgtgatgcccacggtggacactgggcccacgcgctgcccctcgtggaggccgtacagatgcatcttgtatttgcgcccgggctccaggccccccacggtgacctcgctctcctcgcccctgacacgcaccacctggggctgcccgtccctgtccttgtactgcacggtgaaggagtcgaagcggccctgggggacggtccaggagaggctcagcgagtcaggggaggatcctgtcactgtcaactcccccaggagcggctcctcaggggcctccggggcctcagtgctgggttctgtggggctgggggtctcttcctctgcagtggagaaggagggagagagagtgagggggatgtccttgggtcctggggaaaaggagggagaagccaaggctatgactgggggacctgaggtcatttcagagaagtccattcttggggctgggtggtcctgctcagctgacagctaacacacgtaacaagttccagggtcagctgtggggggacctggcacagccaccagcacagcaaaactcctgatggcccctccctgctcagggggagccaggggtcaaccacataggaaggcccaaggggagtcccagccccagccacaagcagttctgtggtgctgaccagacccctgtcccattccccaccagtcatcaccaaagagcaagaggtggccctcccacagctcccaccctggggctcccatcattcactcacccgtcaccccaatggcagacacagggcctacgcgctggccaccgtggaagccgtacaggttcatcttgtatttatggtctggctccaggcctgagatggtgaccccgtcctcgtgccccggcacccgcaccgccttgggctgcccatccccattcctgtactggaccaggaagtggtcaaactggccctcgggaaccatccaggacaggctgagggagtcgggggtggcatctgtcacggtcagctcccccaggcgaggcttgatggggggctcaggggtcatggtaggcactgcttgggtggtctcggcttcatcctttggagctggacagacacgtgtggggacagtgaggaccctgggttctcagttcagcatagaaaggatgtgtcacaaaacacaaagtgcccaagaacaggacgatgctgcccacagcgcctccagcacagctcttcatcctctcctcccctgcggcctttcctatccctcaccctgacccccctgccctcggcccccacctcacccccacctcccaacacccaggccacctctccctgtccctccagcaccgcctctcttttgagcacagctccacttggcctctgcacccttaccctccctgcactggggtctcctcgccatcttttgttcactgggcttctgtctttgctctgcaacaagctcagcacactcctcccgaggccagagcctggggtgtgttcctggacccagcccctcaccagctgccagcagcctcagagttacctctcccccgagtttccctggataccttcctccccaacctccagtccccgatcctagtttgagccactgtcacctctcaccagggccaccaactgcctattggcttccctgcctctaggctccctgccaccccatccccatctttagcccccacagatgagcttcacacaggcacagctgctggggccatctcagcacagacctgggcaatcacatcctcatccctgggagaccccaggcctcctctgctcccacacttcaggactatctattcactgcaaaggacaccccactcaatcctcagtacttctcacacaccatgctctttctagcctcctggcctttgcaccacctgtgctgatctgacacgcttcaccttctctctaaagctgtcaccaagctaaggcctgcctggcctcagatcctgactgtcccctgagtatccacaggtagggtggtttaggtattcctgcctggctctgggcttcttgtcacatgctcacccgcctttgctttcttactggtccacagcctgtcccccatgacgttagccccattaggacaggaacttttcccattaggacaggaaccctaactctgagcctaacctctgtgaggattcatgaatgcaagaaaaattcgcttcaacaaattctaagagagtttccaaatctgttactgggaggagctttgctacaaaggtgttctgtgatttgcacacaaatattcatagcagcattattcttgatagctaagaggtggaagcaacccagatgtccatcaatggatgaaaggatgagcaaagtgtggtctgtatgtgtaaaacgaaacattattcagcctgaaaaggaaggaagttctggccaggtgcagtggctcttgcctataatcccagcactttgggaggtcaaggtgggagactcgcttgaggccaggagtttgagaccagcctgggcaacataccgagacccccattgccacagaaaataaaataaaaaggaaattctgactgatgctacgacatagatgaaccttaaagacattgtatttaatgaaatgaaccattcaaaaaagacaaatattgtatgattgcacttatatgaggtacctagagtcaaattcatagagacagagagtagaatggtgttgccaggggctggggcaaggggagaatgggagttcgtgtctagtgggtaggaagtttcagtgtgggaagaggagttctggaagtggagggtgacagtccacagcaatgtgagtggacttcatgctggactgcaaactagaaagcgattagaatggcgaattatgtcaagtgtactttactacaataaaaaacaacaaaaaaagtgtgttccttggaccagtggcatcaagatagatgagaatcttgttagaaatggatggtcggctgggcgccgtggctcacgcctatgatcccagcactttgggaggccgaggagggcagatcacgaggtcaggagattgagaccatcctggctaacacggtgaaacccatctctactaaaaatatgaaaaaattagctgggcgtggtggcgcacgcctgtagtcccagttactcaggaggctgaggtaggagaatcacttgaacccaggaggcggaggttccagtgagccgagattgagccactgtactccagcctgggtgacaaagcgagactctatctcaaaaaaaaaaaaaagaaagaaagaaaaagaaagaaatgcatggtctcttgccctaggccaagcctgctgaatccaaatctgctttttaacaaaaatctccaggcatttggatacacaaaggaaggaatactcttcagagtatgttttcacgaagactggagagacagcagtgtcttccagggccatcttccccacctcgcctcactcacacttactcacctgtcacacccacagcggacactgggcccacgcgctgcccctcgtggaggccgtacaggtgcatcttgtatttgcacccgggctccaggccccccacggtgacctcgctctcctcgcccctgacacgcaccacctggggccgcccgtccctgtccttgtactgcacagtgaaggagtcgaagcggccctgggggatggtccaggagaggctcagcgagtcaggggaggatcctgtcactgtcagctcccccaggagcggctcctcagggggctccggggcctccgtgctgggttctgtgggggcgggagtttcttcctctgcagctgagaagaggggacagagaaggtgaggcagcttccctgggggatgtccttgggtcttgtgaggaaggagagcgaagctgtggccatgagtgggggtcctggggtcagcttggagaggcccatctttggagctgggtggtcttgctcagtttacagtcaacacacatgacaagctctgaggtcagtgctggggaacttgggacagccaccaacagagctcacagggcccttctccacccaggaagatctgtcagtcctcagggaagtggggaaagacaaaaaagtaccatggctcagccaagagcagaggggcttcctgggccagttcacccatcaccagagaaagggagaccctcccacaggccccactctggggctcccatcgtacactcacctgtcaccccaatgacagagatggggcccacgcgctggccaccgtggaagccgtacaggttcatcttgtacttgtggtctggctccaggcctgagatggtgaccccgtcctcgtgccccggcacccgcaccaccttgggctgcccatccccattcctgtactggaccaggaagtggtcaaactggccctcggggaccatccaggacaggctgagggagtcaggggtggcatctgtcacggtcagctccccgaggcgaggcttgttggggggctcaggggttgtggtgggcactgcttgggtggtctctgcttcatcctctggagctggacagacacgtgtggggagagtgaggtccctgggttctcagttcagcatagaaaggatgtgtcacaaaacacaaagtgcccaagagcaggacgatgctgcccacagcgcctccagcacagctcttcatcctctcctctcctgcggcctttcctatccctcaccctgacccccctgccctcagcccccacctcacccccacctcccaacacccaggccacctctccctgtccctccagcaccgcctctcttttgagcacagccccactcggcctctgcacccttagcctccctgcactggtgtctcctcgccatcttttgttcactgggcttctgtctttgctccgcaacaagctcagcacactcctcccgaggccagagcttggggtgtgttcctggacccagcccctcaccagctgccagcagcctcagagtacctctcccccgagtttccctggataccttcctcccccacctccagtccccaatcctagtttgagccactgtcacctctcaccagggccaccaactgcctactggcctccctgcctccaggctccctgccaccccatccccatctttagctcccacggatgaacttcacacaggcacagctgctggggccatctcagcacagacctgggcaaccacatcctcatccctgggagaccccaggcctggtgagtggtcccctcctctgctcccacacttcaggatgatccaccaactgcaaaggacaccccactcaatcctcagtgtctctcacacaccatgctctttctagcctcctggcctttgcactagctgtgatgatttgacatgcttcacttcctctccaaagctgtcatcaagctaaggcctgcctggcctcaggtcctggctgtcccctgggtacttgtgggcagagtgacttcactgtcccttcccaatcctggcttggctcctgggctccacatgctcatccttctttgcttactttccggttttctgcttgtgcccacaattgtgagccccatgaaaacatgaacttgtgtgtgtcactttccagcttccgcctatgaaagaaaaaggcagccctgacacccgtgagctgccctttccctctgccaggccacggctgcttggggctggcctggcacagtctggtcttggcgtggtccagttgaacagacaatttcatggaacatcaacatcagactaggccatttgtcagtaggatggatcaagacaagaacaaggccagtctgtgatcatgtctcagtaaggatgaactctaacattttccaaagcacaaaaataaccaaacatcacccatccagctaatctgagtgatagctgcttctttaccaatggcagctttggccttgctctagttgacctccccaaagataagacttagtgagacgcccggtaatagggttatcccttcttcctgacagcgtctaataaagagcaaaaccttgcttccttaaatgctttcctaaaacaccaaacacaagcccagttccttaacaatctctttctaaagcctcttcctaagtcaccccacagtcctcctgcactgcatggagcataattccatccattcaattttaggtgagtttctggaggtcgttggccagaggacattgataccctaaaattacagtgtccggatcagggcaaggaattctttgctgaatgaacaaattggcccattggtgagaaaggtctgttcctattcctattccaatagtgggcttccagagtgtgcagtcgacgcgctgcccctcactgccttctgtcttccttcacggcccctagtcaactccacagagaaagcacactaccaggaatcagggacgcagaaaaattctcttcaacagatttcaaaagagggtccaattcctttgtcgtgaagaactttgctactcaaggggcgtgatcatgggccagcagcatccgcatcatttcttgttggaaatgcagaatctctggccctagcccaaacctgttgaaccccaatctgcctcttagcaagatccccaagcatggaaacgtgcaaaagaagcccggctggtgagaatatttttgttttcatgaagttgcagagaaagcaacatcttctagggccatcttcctcactcacaaacactcacctgtcacacccacggtggacaccgggcccacacgccgcccctcgtggaggccgtacaggtgcatcttgtatttgcgcccgggctccaggccccccacggtgacctcgctctcctcgcccctgacacgcatcacctggggccgcccgtccctgtccttgtactgcacggtgaaggagtcgaagtggccctgggggatggtccaggagaggctcagcgagtcaggggaggatcctgtcactgtcagctcccccaggagcggctcctcagggggctcccgggcctcagtgctgagttccgtggggctgggggtctcttcctctgcagctgagaaaaggagatatagagaggatgccaggtgcctgggggatgtgctcaggtcttcaagggaaggagggagaaaccatggccactactgggtatgtgaggtcatttcagaaaagcccattcttggggctgggtggtcctgctcaactgacagctaacacacatgacaagttccagggtcagctgtgggggacctgggacagtcaccagcacagcagaactcctgatggcccctccctgctcaggaggagccaggggtcagcctcagaggaaggcccaaggggagccccagccacaagcaggtctgtggtgctgaccggacccctggcccattccccaccagtcatcaccaaagagcaagagggtgaccctcccacggctcccaccctggggctgccatcatccactcacccgtcaccccaatgacagagatggggcccacgcgctggccaccgtggaagccgtacaggttcatcttgtatttatggtctggctccaggcctgagatggtgaccccgtcctcgtgccccggcacccgcaccgccttgggctgcccatccccattcctgtactggaccaggaagtggtcaaactggccctcgggaaccgtccaggacaggctgagggagtcaggggtggcatctgtcatggtcagctcccccaggcgaggcttgatggggggctcaggggtcatggtaggcactgcttgggtggtctcggcttcatcctctggagttggacagacacgtgtggggacagtgaggtccctggctcctcagttcagcatagaaaggatgtgtcacaaaacacaaagtgcccaagagcaggacgatgctgcccacagcccctccagcacagctcttcatcctctcctctcctgtggcctttcctatccctcaccctgaccctcctgccctcagcccccacctcacccccacctcccaacacccaggccacctctccctgtccctccagcaccgcctctcttttgagcacagccccactcggcctctgcacccctggcctcccagcactggggtctcttcgccatcttttgttcactgggcttctgtctttgctccgcaacaagctcagcacactcctcccgaggccagagcctggggtgtgttcctggatccagctcctcaccagctgccagcagcctcagagcatctttaccctgaattcccctggataccttcctaccccacctccagtccccgatcctagtttgagccactgtcacctctcaccagggccaccaactgcctactggcctcgctgcctccaggctccctgccaccccatccccatcttcagcccccacggatgagcttcacacaggcacagctgctggggccatctcagcacagacctgggcaaccacatcctcatccctgggagaccccaggcctggtgagtggtcccctcctctgctcccacacttcaggatgagatactcaccgtaaaggacaccccactcaatcctcagtgcctctcacgtgccatgctctttctagcctcctggcctttgcaccagctgtgattatctgacacacttcaccttctctctaaagctgtcaccaagctaaggcatgcctggcctcaggtcctggctgtcccctgggtacccatgggcagggtgacttaggcgtccctgtctggtcctgacctgagccctgggcctccctatcacatgctcacccgcctttgcttcatttgctggattgcagcctgtctctccatgacatgtctttccataatgttgctatattcctttcactgtgagccccatcaagacagaaatatgtataggaaaatggtagagaagggcacattttctagggctgtcttccaaccctgccccacccacactcactcacctgtgacgcccacggcagacaccgggcccaggcgccgcccctcgtggaggccgtacaggtgcatcttgtacttgcgcccaggctccaggcccctcacagtgaccttgctctcctggcccccaacacgcaccgcctggggccgcccgtccctgtccttgtactgcacggtgaaggagtcaaagcggccctgggggacggtccaggaaaggctcagcgagtcaggggaggatcctgtcactgtcagctcccccaggagaggctcctcggggggctctggggcctctgtgcctggttctgtagggctgggggtctcgtccacatcctcttgtggggctgaaaggtaatatagggggatacagagtttaagggtttaagggcaacttgctttgctggtgctgtcaacagaggtcatacatcaaatgcgcccctccagagcaggctgagggctggggcagctttgtgttcgccgttcagtgactcttggaataagagccggtgaggtatccccgagcccccggcctgtactgctggcagagctgcactgttagaaacctccagaaggcaactgagacatagtgtcaggagccaaagtaattctcatttcctttgacccaataatcccagttctgggcatctgtcctaagaaaattattaaagcaggaaaaagttatagcatggaagaactcacgatggggttattcatgacagcagatgtgtcaggaacacaaatgacccgtagaagatgattaattttgttatagtgctttcaccgcaacgcatcaaataaccattgaaacgatgatgaatgctggttgtgtagccgtgaggtgaatgattacaatgtacttgtgtacaaaaaaggaagtgccaagaactttatgaacactgattgcaactttaaaacacgctctgcatgcaaaatacaggaagggaatgtgcactacacacattgttattaatgccggcagctgggggagaaagtaggactatgagattcttgttttctgtttttcaagctttccacataatgttgctgtattattttcactagaaaaacgtgggctaaaaaagaaattctgggctgggagcagtggttcacgcctgtaatcctagcattttgggaggccgaggcgggtggatcacctgaggttgggaattcgagtctagcttggccaatatcatgaaacccggtctctactgaaaatacaaaaattagccaggcgtggtggcatgcacctgtaatcccagctactcaggaggctgaggcaggacaatcacttgaacctgggaggcagaggttgcagtgagctgagatcacaccactgcactccagcctgggcaacagagtgagactcagtctcaaaaaaaaaaaaaaaaaagaaaaagaaagaaagaaattctgggctacaacaattaataatagagtgtggggtgggggtggggcagcaatacacatagaacaggaggggcaggggtgggtccctcagcctgtcctctgtcagttctgtggttccccacagtggagacaggaacacaaaactgaacgtggaccaggacagcttacccccggaatgtgaatttttctaatgttcattttccaataatttccctattccccctgtttcccaacactcagatggtcctctgaacatgcatatggaaatgaggcctctcccccaggaatcggggatgccgattgagagtgcttcctctgtctggatggcctttgggagatgagctcgcacctcacttggtgccacagaggtggcgacctgccctgcaagagaccgcctctcagcagggctgattcttccccatcggtaggaattctcgaaaaatactctaagccaggcataacaacctggctgaggatgacttagaaaaggcagcctgactgagcatttggaattcaattaacctcatgatctccacccctccaatttcttatggactagaaattttgaacttcctcataattagaaatgaaataagtctggctgggcgcggtggctcatgcctgtaatcccagcactttgggaggccgaggcgggcagatcacctgaggtcaggagtttgagcagcctgaccaacatggagaaactccctctctactaaaaatacaaaattagccagatgtggtggcgcatgcctgtaatcccagctactcgggaggctgaggcaggagaatcgcttgaatccaggaggcagaggttgtagtgagccgagatcatgccattgcactccagcctgggcgacaagagcgaaacttcatctcaaaaaaaaaaaagaaggaaataaatgaaataagccacaagagcgatagaggagtaggacagatggagtgtaaagaaggagaagacattatatattttctcttttccctttccctgattgtaaaagaaatgtttgccatttaagaaaatttggactatgcagaatagaataatacagaaaaaaatgtgctggaatattctattctatctaacaaatcaggcaacccgtgggatgtgtttctttccagtcttcttgccatgcctgttactttcaaatggttgtgattagcatccttacaaaaatttgggctcctttttcttcttttttgagactgagtttggctgtatctgccaggctggagtgcagtggtgatctcggctcactgcaacctctgcctcccgggttcaagcaattctcgtgcctccacctcccaagtaactgggattacaggcatgtgccaccatgcttggctaatttttgtatttttagtagagatggggtttcaccatgttggctagactggtctggaactcctgacctcaggcgatcagcccgcctcggcctcccaaagtgctgggattacaggcgtaagccactgtgcccagcctaggctctcttttttcaatgtaacattataaagtaagggtcttatgttaaaacatttcagtggcggcataatagctctttttatagatgttgcctaaattatttagtcatcccaacgtggtttgacgttggattgttcctcttgtgtgcatttgtgtatgtggttataacaaagaatgctgttattaagatggaaagaaaggaaaattctcgtaagtcaggcttggtgtgcgcctgacatatttcactcttggaggttatcagtggttgaccattagagggaggccacgccaaagtgaacaagcaaaccgctagcataggccacagccacagggcacagagggagggcaggacacaggagacaagtctggacccacagggcttggtgaaagggcacagcagtaaaccaggtacccatgagggaaaggtggttaccccgagactccaagcactactcaccagtcacgcccacggtggacaccgggcccacgcgccgcccctcgtggaggccatacaggtgcatcttgtatttgcgcccaggctccaggccccccacggtgacctcgctctcctcgcccccaacacgcaccacctggggccgcccgtccctgtccttgtactgcacggtgaaggagtcgaagcggccctgggggacggtccaggagaggctcagcgagtcaggggaggatcctgtcactgttagctcccccaggagcggctcctcagggggctccggggcctccatgctgggttctgtggggctgggggtctcttcctctgcagctgagaaaaagggacacagagaggatggcagggtccctgggggatgtgcttacgtcgtggggaaaaggagggagaaggctatgactaggggacatatgaaatagccaaggctatgactaggggacctgaggtcagttcagagaggcccattcttggggtcctgctcagctgacagctaacacacatgacaaattccagggtcagctgtgggggacctggcacagccaccagcacagcaaaactcccaatggcccctccctgctcagggggagccaggggtcaaccacacaaaaaggtacaatgggagccccagccccagccacaagtaggtctgtggtgctgaccagacccgtcccattccccaccagtcatcaccaaagagcaagagggtgaccctcccatggctcccaccctggggctcccatcgtccattcacctgtcaccccgatggcagacacggggcccacacgctggccaccgtggaagccgtacaggttcatcttgtacttgttgtctggctccaggccggagatggtgaccctgtcctcatgtcctggcacccgtgttgccttgggctgcccatccccattcttgtactggaccaggaagtggtcaaactgtccctcgggaaccgtccaggacaggctgagggagtcaggggtcgcatctgtcacggtcagctcctccaggcgaggcttgatggggggttcaggggtgggaggttctgtcgaggctggggccatttcttcatcctttcctggggctgcatcagaaaatagaatgggtgggcatgcctggtgggcctccttttaaccaagggactctgggattctcttagacacaccaagggcccacagtctggatgctggtgccccaagcttagaatatcatttttctgctttgaatgttcagttaacaccacacctgtggtgaagtcatgatgctcaggtggcatccctgtgatgctcagtgtgcaggcctgggacccttaggagctgccaagcaaatttgttttgcaggacagaattgatgctttataagaacaccaaccagggccgggtgtggtggctcaggcctgtaatctcagcactttgggaggccgaggcgggcggatcatgaggtcaggagattgagaccatcctggctaacactgtgaaaccccgtctttactaaaaatacaaaaaattagccaggcgtgttggcgggcacctgtagtcccagctactcaggaggctgaggcaggagaatggcatgaacccaggaggcggagcttgcggtgagccaagatcacgccactgcactccatcctgggagacagcgagactccttctcaagaaaaaaacaaacaaacaaaaacaaacaaacaaacaaaaaacagcaatcagggccaggcgtggtggctcaggcctgtaatcccagcactttgggaggccgaggcgggaggatcacctgaggtcaggagcttgagaccagcctggccaacatggcgaaatcctgtctgtactaaaaatacaaaaattagccagatgtgctggtgcatgcctgtaatcccagctactcggaaggctgaggcaggagaactgcttggacctgggaggcagaggttgcaatgagctgagatcgcaccacggcactccagcctgagagcctgggtgacagagtgagactccatctcaacataaagaaaaaaaaaaaaagaaaacaaagaacaccaaccaaacacaacaggcaagttgtatcaggaggttcatccacctgggcttggaaattccacctaatcctgagcatttttagaaaccaacttagattttatagctgagggtagagagatgagaccacatgagggcatctttgcagctgagttgtctctggacctgcagtagctctgctaacttacggcagagagagcacctccagtgatgccagttcttttggcccgtgtgaaatcaattgctttgttttcattgatttctttaatcttttctgctcttcatagggttttattctgccttgatagtggtattacaaattcatcacatttcatttgtctgttctttttgagaactgagtcttaagcatctagggggtaacagctataaaagagcttacaaaagcatcaaagagccgagttacagggtaatgaaaggaaaatgccttattaagttgtgcacatggccaatatttacaattaaagtaatagtatccatgttaacaggattcagtgttgttttaaaaataaatgggtattaatttgggagcttagagaacacatacaatttttcccactgaaatcagtgataattatgagaatttgccctaagcggttttcaggaactacctaccttcctcagaagggaaagactgcagttatctctcattgtgtgtgagagccaagccacactcccgcccacccttcacgacaggtatggttattccttctttacagatgaggaaaaggatgtacagagaggtcgtgtgtctgttttttgtttgcttgttttgtttttttgagacagggtctcactctgtcacacaggctggagtgcagtggctcgatctcggctcactgcaacctccgcctcctgggttcaagcgattctcccgccttagcctcccgagtagctgggactacaggcatgtgccaccacacccagctaatttttgtatttttagtagagatgggggtttcatgatgttggccaggctggtctcgaactcctgacctcaagtgatctgcccccttcggcctcccaaagtgctgggattacaggcatgagccaccgtgcccagacaggttgtgtgagtctcttgaggacacacagctcaaatgggctgaagctatggtcaaccccaggtgtgcctcagtctgtgttattttcctggtcccccacctctttgggaacccaaaaagcccatgtgtaacgggcagaagacctggggcaataccaaagtctcggagtgaaggcaccagcagaaccattcccaggagcttgggaggcttggtctcagggaaagtaaaataaagccaccagatactgacaataaaagggaaactgagtctagttcagggcagggcccagtgccctactgcacactcaccagttaaaccaacagcagacacggggcccacgcgctggccaccgtggaagccgtacaggttcatcttgtacttgtggtctggctccaggcccgagatggtgaccccatcctcgtgtcccggcacccgcaccgccttgggctgcccgtccccattcttaaactggaccaagaaatggtcaaactggccctcggggactgtccaggagaggctgagggagtcggaggtgatgtctctcactgtcatctgccctaggcgcagctttgcaagaggagcatcaggggactcctcttcgggggctaggaagagatagaaacagaatcttttctcttgctgcaaggaggtgttgaggccccagctgtcttgaattcaggtcagaaggtgggcccagtctggccctaacttaagatcgatttctgattataatcataatcagattttgtggcttccttatggtccctcaaccatgccaggcagcctcctacctcagtacttttacaatgactgttccctctacctaaatgttctttccccagatatcttcatggctcatccccacacttcctttaagtctttgttcaaaagccaccttcttctgtgggccttccctgattactctatttaaaatttcagttttctcaattgcaatgtatcctccttctatagacctgatttcagcaacaaattgggaaacaacaattatgagacactcgggagactgtagcactacctggatacttgatatcaaggcatgattgttcacttatcaaggtatgctaattgtattgtggaattttattatttatttatttattttttgacacagagtctcactctgtcacccaggctggagtgcagtggcgcgatcttggctcactgcaacctccacctcctgggtgcaagcaatttcttgtgcctcaacccccgccaagtagctgggactacaggcacgtgccaccacgctccgcttttttgtactttttaaaatttattattattattattatttttagtagagacggggtttcaccatgttggtcaggctggtcttgaactctttacctcaagtgatccacctgccttggcctcccaaagtgctgggattacaagcgtgaaccacctcacctggccatattgtggattttttaaaaataatttttttaaaaagagatatacctttaaatatttagtgatgaaagcataggatgtctgtggttcgtttttaaaatactgcagtagtataaccacacaatgcaatactgtttggcaataaaaagcagtgtagtggctgagagagagcaggtggctcatgcctgctatcccagcactttgtaaggcccaggcaggaggattccttgaagccaggagtttgatatcagcctgggtaacactgtgagaccccatctctacaaaaaatttttttaaattagctgagtgtggtggcgagcacctgtggccccagctacctggggggctgagatgggaggatggcttgagcccaggagtctggggctgcagtgagctatgatcatgccactgcactatagcctgggcaatagagtgggaatttgtctcaaaaaaaatcaatcaatcaatcaatcaatcaatcaatagcaatgtagtaagtatagtacttctacatgctacattgatgaacctcaaaaacattatgctcagtgaaagaagctagacacaaaagaatacatattgtttgagtccatttatacgaaatgttctggaacagcaatctacagagaaaaaagtagattagttataaactagggctgaggtaggaatgggtctggacccaagatttcttttgggggtgatggaaaagttctaaaattagatcgtggtgatggctgcacaagtaggtaaagatactaaaatcagtaagttgtacactaaaaacaagtgtattttatgccacatgaattatatctccataaaggtgttaataaagaaaacattcaggccgggtgtggcggctcacgcctggaatcctatcactttggctgaggtgggaggataacttgagcccaggagttcgagactggcctgggcaacatggctaaaccctgtctctacaaaaaatacaaaaaattagctgggcatggtggagtgcacttgtagtcccagctattcgggaggctgaagtgggaggatcccttaagcccaggaggttgaggctgcagtgcagtgaattgtgactgtgccagtacactctagcccaggcgacagagtgagaccttgtctaaaaagaaagaaagaaaagaatgaaagaaagaaagaaagagaaagaaagaaaggaaggaaggaagaaagaaagaaagaaagaaagaaagaaagaaagaaagaaagaaagaaagaaagaaagaaagaaaacattctagtgattctagtggaggaagtgggtggggcagagatgagccagactggccagaagtcgatatttgattgaaggaggatggcagggtctttgtactattctttctgtttatacatttgaaattttatttaacaaatacttattaatttaattaatttgtatttcaaaaatgtgttccaatctcacaaaaagagttatgtatagagttccaaggaaaagcggagagccacaaaccagccagtgaatcacctcccaagaggcctcagtccctgggggcctttcccatatggctccgacacttctcctggatttgctctctctgtccccagatcacacctgtcctgagcctttagtgaacagggtgtattacaggtttgaggtcttggggttctgggtccctagtggaggagatgctggaggctgtactttgctaagacccaacccagagggctctgcagtgcacactcacccgtgacgcccacagcagacactgggcccacgcgccgcccctcgtggaggccgtacaggtgcatcttgtacttgcgcccaggctccaggccccccacggtgacttcactctcctcgcccccaacacgcaccacctggggccgcccgtccctgtccttgtactgcacggtgaaggagtcgaagcggccctgggggacggtccaggagaggctcagcgagtcaggggaggatcctgtcactgttagctcccccaggagcggctcctcagcgggctccggggcctccatgctgggttctgtggggctgggggtctcttcctctgcagctgagaaggaggaagagagagtgagggggatgtccttgggtactggggaaaaggagggagaagccaaggctatgactgggggacccgaggtcagttcagagaggcctactcttggggctgggtggtcctgctcagctgacagctaacacacatgacaagttccagggtcagctgtgggggacctgggacagccaccagcacagcaaaattcccgatggcccctctctgttcaggaggagccagtggtcaacctcacaggaaggcccaaggggagccccagccccagccacaagcaggtctgtggtgctgaccagacccttgtcccattccccaccagtcatcaccaaagagcaagagggtgaccctcccatggctcccaccctggggctcccatcatccactcacctgtcaccccgacgacagacacagggcccatgcgctggccaccgtggaagccgtacaggttcatcttgtatttatggtctggctccaggcccgagatggtgaccccttcctcgtgccctggcaccctcactgccttgggctgcccatctccattcctgtactggaccaggaagtggtcaaactgtccctcgggaactgtccaggacaggctgagggagtcaggggtggcatctgtcacggtcagctcccccaggcgaggcttgatggggggctcgggggttgcggtgggaggttctgaaggcttctcctcctccgggactggacagagacatggaaagagaggactgaggtgggcagggtatccgcgggactctgctgtcctctggactctcccagccatctgaaaggaggcatagtgggcagagttctcacctgtcagggcctcgacatggacaggacctacatgcttcccatcactgaaaccatacagggtcaccaggtatctgtggtcggattccaggccagagagggtgatgtcattccggtcacctcctatgcggaccatttggagttgcccgtctctatctgtgtactggatttcgaaggagtcaaattctccctcagtcaccatccaggagagatgcagggtgtgtgacgtggcctcctccactgtcaactccccgaggtggggctcaggcgctggaggggtcggggccgtggtctcagtttccgtttcttccctgccggctggttcacagagacaggtagagacagatggctggtgtgtcgctgcacccagactctcaggaggagtgagggaggagagggagtgagggcaagcagtcagcaatcgaaagaccagcttttgctgcacatgggtgaatttcaaaagcattgtgctaattgcaagaaatgaaacacaagagactgcgtattgtgattccattacatggagagtcaaaatgctgtctccaggatgatcgaaagcagacagtggttgctggaggctgggactggggcaactgactctaaaggggcacaaggaaactttctggatcaatggaaatgatataaaatgggaagctcagagatcttatggctcagtcagaccaggagagccaggcgggaaggaggcacaggtgttccagctgccgcacactcaccagtaatggcgacggccgagatggggcccacacgcttgccgtggtgcagcccgtagagcagcagcttgtacctgtgggcagggtccaggcccggcacgctgacctccctgaggctgccctccacgggcaccacctggggctgcccgtccctgtctttgtactggaccacaaaggagtcaaactggccctcagggactgtccaggagaggcccacggagttctgggtcacggtggtcacctgcagctcctcccccagacggggttttgggggacgctttgttccagtatcatccatagcactccgggcttctgagatggagacacggagaggaaacggctgagctgtttctggaagactgggtgacctcgacgggcaggattgagaggtctggagacagggctttgcgtggctgagtcctgccgggctgtgctaggggcttgtgcagggacgtggggagctggatctgagccgagtggctggggccaaataatggtaatggcagccaccacaagtgaccgtctgctgcttggcctgaggggagcagagcagggacctgcagggaatgcccctcacccgtggtgccgtcggcagtgagagggccatggcgcttcttgcccaggaggccatagaggaggaatctgtacttgcggccggcatccagaggggtgacagtgacagagcgctcatggccctccacgggcaccacctggggcccgtctttgtccttgaactggaccacaaaagagtcgaactggccctcaggaaccgtccaggagaggcgcagtgagtctggggtggggtctgtcacccacagctccccaaggcggggtggggcccctgggctggcgtcacctcgggcaactggagaggaaaggttcttgtgtttattttttccaaaacgactccttgactgcctccctctggggctggaaaaacccagaactgcccaaatgctcagtgcttccccaaaatatttccatcacctcccatcctcaccaccatctccgtctggtccatgcctctctccccttgacccaagtggggagggtcacctgtcctgagtcacctccaggaaaagagattccctagctccctgcctcatcttactcccctttctgtccagcctctttccgcctctcacagactgcttccccagcagggtgcagcttcttacagactgggtctctatctcctcttacccaggagcacacgatttggccgtgatttggccggcccctgaggaaaggggtgatttggccggccccgaggagcgcaggatccctgatgggggcactcggcaggtcagggaggcaggatgttacgacacaggtagttctcacccttctccgttccctttcttattctgcaccggctggcccgggagaactaaggctcccactgggcctggtgaaggagcgtgggctgcctgtgagaatgttgagggggatgatgccggggagctcaggcagggaagggatctggtgtctgcctgaggagccatcccagggcttgagaaggagctggcctgctgccttcctggacggtgaggacgctgacgacattgttattgcaagttttctggcaatagggagcccccaggggcaggggagggcttggactgaaccctcggaaaggggcacagctgggctgggctcctctggttcccaatttctgagacttcaggaggagggcagagaaggaagggcagcctctgtaggaggcacatatgggcccagacaggcctgagctaggagggtgagaacctgggtgagagtcacaggggagacaacaaagactctcaggaggtgatggattcgcaaggcaggaagggttcctggctcccctcgccccttctcccagcacccccaggctcccacatccaccctgcaggaagaggcctgtaggggcttccctcatccaacaaaagtggaaattacgagaagagaggcagagtcagcaggggacagcagacccaggaactggccccactctcctggtcctcatctgctttgcggcttttctttctttttttttttttttggtcttttttgagacggagtctggctctatcacccaggctggagtgcagtggcgcaatctcagctccctgcagcctccacctcctgggttcaagtgattcttgtgcctcagactcccgagtagctggaattactagcacccatcaccacacccagctaatttttgtctttttagtagagacagggttttgccatgttggccagactggtctcaaactcctgacctgccttggactcccaaagtgctgggattacaggcatgagtcactgtgctagccccatgtggcttttcaaatgagacagagcaggtggacaaagggaagactcagcagagggagtgaagagaagggtgggaaggctgtggcctcaggctcagctgtgtaggggcccatctcacccgtctttgcctccacagagactgggctgcgtcgtttcccatcctggatcccaaagagcaggaacttgtacttgcgggagggttccaggtcagggatagtgacctcccgctgatctgcagccacgggcaccacctggggctgcccgtccctgtccttgtactgaaccacaaaggagtcgaattcaccctcagggactgtccatgagaggcccacagagtcaggggttatatccgtcactgtcagctcccctaggcgtggctccaggggaggcttggaggcctctgtggctggggctggtgggaggggagctgggatttgggaagacaaagaacatggttgagatctctgaggggagaacccctgggctttgagggcctcaggggggctgtgaactgagatggggaatagttacacctttacttccagacctctaactgaaatgcagcatttctttccaaaactaatatagaaaacccaccagagtagaattattgtgactttgttaccaatagaaaccacagatgttttcatgtcaccttagagttattgcagaaactttaaaataccttttatatccatcactgcttctaaattttgtagtttagtaaacgcgccaccaagtcctgttatttaatgaactagtaaataagtccaagtattactaaatcgtaactttggatttttaagaaatattttgggccgggtgcagtggctcatgccaggccgaggcgggtggatcacctgaggtcaggagtttgaggccagcctggccaacatggcgaaaccctgtttctactaaaaatacaaaaaattagctgggtgtggtggcacgtgcccgtaatcccagttactcgggaggctgaggcaggagaattgcttgaacttgggaagcggaggttgcagtgagccgagatcgcgccattgcactccagcctggatgacaagagcaaaactccatctcaaaaataaaaaagaaatattttgataactgtctataaatataatgtttcctttgtaatcctatacagcttattttacagatttaaaaacattgccttcaggtggggtaggggtttcaccagatgccacagcacaacaatcatggagaacctgtgcccaggaagccatgaggggcaggaaggagcccagagcaagagtgaggcagcctcctggagagatgaaaactctccagggctgggatggaatgcagtgcaggcaggtggcagaggactcctgagaagggactcaggatgtaaagcacttcgcctcaacaaaaaagggcagaagcaggaggtggcagctgtgtccaagtcacagcagggttgtaaagagaaggggtggaaacagctgtgggcagtcggagagggggagagaaagtctgtggctggatttaggccaaatggaaataagacattcccctgggcggggggcagagtggagatggggaaggagctggagggctgagaaggctctagccctgggaggagtaaaggggtcagggaacagaaagactggcagggtcaccgagccagggcctgaggggatctagcccctcagtgagggtgcggtggtaccaaggcagggctggaagaagggccatggggtgggggagctctgggtaaccagagatgaggactgagtccccccattactcacccgtcacgatgaccacagacagggggcccatgcgttgcccatcatgtagtccatacatgttcatcttatattttctctcaggctccaggttgtagactgtgacctctcgctggtctgccgccaccggcaccacctggggctgcccgtccttgtccttgtactggactatgaaggagtcaaactggccctcggggactgtccaggagaggcccacagagttgggggtcacatctgtcactgtcagctctcctaggcgtggctccagcggggactcagtggctggaggggtctcttcttgttgtggggctgggacagagatggtagggggctgttagtaaagaatcccccttttcttatagtaatgatgtctagttatttattttttattttttatttttgagatggagtctcgctgtcacccagagcagtgggcgacctcggctcactgcagcctctgcctcccgggttcaagcgatcctcctgccttagcctcccaagtagctgggactacaggcgtgcgccaccatgcctgcctaattttgtgtgtgtgtgtatttttagtggagacggcatttgccatgttggccaggctggtctcaaacccctgacctcaggtgatccacctgcctcagcccccaaagtgctgggattacaggtgtgagccaccacacccagcgatgtctgttgcatttgtggaacccgcatgatggttttgatgtaaaagcgcattgatctgaacatctgtctggtcaacagtccttcactaggtccctgctcggtgtctgaggctgcatttgttgggggagaagagtatcaaccatcactgacaccctgggagagcgctgaaattccatctatatgccaatgactccagatttacaccctctgtccagacctcccctgaaccccagactagtgttcgtgcaacgtcttccttggaggcctacttgtgtgtcaaactcaacaagtccaaaactgagcctctgagcttcctgacacctgctcccgccacagcctccccacctcagtaagattacaactttttttttttgagacggagtttcgctgttgttgctcaggctggtgtgcgatggcgccctctcggctcaccgcaacctacgcctcctgggttcaagcgattctcctgccttagcctcctgagtagctgggattacaggcatgtgccaccacgtccggctaattttgtattttcagtagagatggggtttctccacgttagtcaggttggtcttgaactcccgacctcaggtgatccgcccgcctcggcctccccaagtgctgggattacaggcatgatcctccacgcctgaccaggattacaacttcattcttccagctgctcagatctaaaccgccagagtcatccccgagtcctctcttaaactccacatccgccctgtgggtatccgcctgttgtcactaccttcagagtctgacccctccttgccacctccaagcaccactggctcctcctggattatcacaacattctctcaggtcatcgccttctgccctcacccccctttagtctgttgggtctgcagccagaaggatcctgttaacacattagccagagctggttcccgcagtggcttctacctcactcagggtgaaatccaagtcctgcactggcctctgaggtcccatattcatctcttagatcattccctattgcctgccctcctccaactccaccacaaaacatactgcatccctcactgtctgcagacatctggggctgcttctcgcctgccagtctctgcatttgctcttccttctgtctgggatgctctttccccaaaggcctaggtggctgtcctctcacctccttcagggctttcctcagacactgccctcgcagtgaggcccttgctgtctccctactaggctctgcttttccccaccactcatcactgtcacatccggtgccactgacatatttgtgcaatttgttgcctgtccctctccactagaatgtgagctcctcaggcaggagctctgctttattcactgctgtgtcccagtccctggcacacagtaggtgctccacagatgtctgtaaaataatgagtggtctacaggtctgggctcaggacctgcagatccccaccactcccgcatgaggaagcactcattagtgagcaaactagaaggtggtcccaagaggcaaaatggcagagaaggtggctggatgggtggggctcccaagaacttgtttctctggcttcctccggagggcaagacaaggctccaagcaagtgacaactgcttaaaacaggctggtgaccaggcctcgggcagacagaaatgagtcaggctggggagggcaggcatggaggcagctgaggtggtgggagggagcagagtgaccaccaagtattgaacatctactatgtacaggtaccaggctgggcattttctctcatttcatttgccttctaaccttacttgttcctgcagcacccattccctgctcctttttgccctctctgcacttctttccatgagggaatgaaaatgtccttcaccatcaagctttattgctggtggtttggattaactggaaaggtacaattataacgattcatgactctggcagtccccatgctgcatgtgggacagtccttttccaatttagaagtgtgtctaatgagctccacgcacctctccccctggcaactgcactgtgtgtgctgccagacacagcccccagcttggcggactccagctgcttcgtccttttgctgctctgataatgcgcactgatgcccatttctttcctaaagggcctcatctattttatccaggacgtgtaaaatacatgtttcaaaatatccagcattagaacatggatatacagggattccctcacgggaaggtctgagcaaaagatgaatgagctgagaagatgccagacatgttacatcaccacctttaaccgtgacaacaagctgggcagcgtttactccctcctgaatatgaggaagctgaggttccaggagaggaggtaagtttttcaagatcatacagctggctgggcacggtgcctcacgcctgtaatcccagcactttgggaggccaaggcgggtggatcatctgaggtcagaagttcgagaccagcctggctaacatggtgaaaccctgtctctactaaaaatacaaaaattagccgggtgtggtggtgggcgcctgtaatcccagctacttggggggctgaggcaggaggactgcttgaacctgggagccagaggttgcagtgagctgagatcatgccactgcactccagcctgggtgacaaagcaagactctgtctcaaaaaaataataataaaataaaaaaataaaaatcatacagctgagaacagaggaagacaggaaggaactcagtttgtcagattcccaaactccatttatctctactgcaccgacttggtcagtgcctgacagagcccatccttaccccagggaccaggcacagggcctcacagagcccagtgtgggtccctgggacagagcggcagagggagggtcactccaggagcagacttggcagcatgtctgggcctggcaccagcctccaccctacaacctcaggccccaaggacagccactcagggtggctttgccgtctccctcttctcagggctgactgaggcaaagaaaataaattgagggtggaaggttctggaaatgaaatcaaccaagtcatgatgaggctgagcttggtggaattacagaaaccatgttctggaaaactatctatttctctacttttaatttttaaatctttccccttatagtaaaagttatttttgagaaaggtgtgtctttgtttctgtgagcaaaggaaaaaagagattcccctcactgtgactaaaccgggcaggtcagcccgagggtcccagaggcactgctgtccactcagcctcttgggctgaggccctggagaggaggtgcccaggctggtcctgtgtggtggtggatgtggccctgtaaccaggcctgagagaaagggtggaagggatgttcttctttgctgtaaagtcactcactggatgagtattaaagaaagccttgtggccgggcgtggtggcttatgcctataatcccagcactttggaaggccaaggcgggtggatcacttgaggtcaagagtttgagaccagcctggctgacatggtaaaaccccatctctattaaaaatacaaaaattagccaggtgtggtggtgcatgcctgtaatcccagctactcgggaggctgaggcaggagaatcacttgaacctgggaggcaaaggttgcagtgagccaagattgcaccactgcattccagcctgggcaacagagctcaaaaaacagaaagaaaggaaaaaaagaaagaaagagagagagagagacagaaagaaagagaaagaaagaaagaaagaaagaaagaaagaaagaaagaaagaaagaaagaaagaaagaaagaaagaaagaaaaagagagaaagaagaaagagaaagctttgtggtcaggcgtggtggctcacgcctgtaataccagaactttgggaggccgaggcaggtggctcacttgaggatctggagtttgagaccagcctggccaacacggtgaaccccgtctctactaaaaatacaaaaaagtaaccaggtgtggtggcacgcatctgtagtcccagctatttgggaggctgaggcaggagaatcacttgaacttgggaggcagaggttgcagtgagctgagatcgcaccactgcactccaggctgggcaacagagtgagactctgtctcaaaaaaaaaaaaaaaaaaaaaaagacaagaaagaaaagaaagcttgcttcaagctgtactgatgaagaggccaatgtctcacgcgcattctcccatccaagtactaaccagacctgaccctgcttagcttctgagatcagaggagatgataggacaccttcagggtggtatggccttagattcatgtgcattctgaccaagtaactgaaccagccaaaggggacaaagcagacctcagagtaagaatatttataacaattctcacagcagacactggcagcatatttacttttgccaggcccattcttgatgctttacatctgttaactcacttaaccctcacaataactctgtgaggtaggtgtccccattttacggacaaggaaacagaggtgcagaaagtttaaaacttgctcagggccatgaaagctggtggtacgccagtccccagtgacatgctctttctaggtcttcccctggcaggcagcctcaaggttccactggagcaaggagagcaactggctacagggaagctgggagccagcagtgggagggaaccaaagcaggcccctgcccctcactcacctgtcacgcccacggcggacaccgggcccacgcgctgcccctcgtggaggccgtacaggtgcatcttgtacttgtgcccgggctctaggcctcccacggtgacctcactctccttgcccccaacacgcaccgcccggggccgcccatccctgtccttgtactgcacggtgaaagagtcgaagctgccctgggggacggtccagaagaggctcagcgaatcaggggaggatcctgtcactgtcagctcccccaggagcggctcctcgggggactccggggcctccgtgcccagttctgtggggctgggggtctcgtccacatcctcctgaggagctgagagaagagatagaggcataaagggctgctggctttgctgctgctgcccacagatgacagccatggaaatgcccttacgctgtgggctcaggggctctgtagcctttgtatttgccattcggtcactcacggatggagaaggctgagacagcccttgccccatcctgctctggtgggttctgtgggggtgaggggtctcccttcgtgtctgagaaaggagctgagatgggaagagaggaagcctctgagggttcttccaaaccacgttcactgacagtgctgacctcagacagtgaggagggcagtgaggcctcttcctacctgtgccctccccagggcactctggctgccccacccctcatatgaggatctgaccatggaatgtgctcttgctgtggcctccccaggcagccctgcccctccctcccctttaaccccaaggaatgaattgctaaggcagggctccaggcatgagtgggagaaaaattctggggtgagtgggatccaaggagagacatgtccttccctggctggctctggaatcacagccctgtgggcacctacccgccccctacagttaggtctctgctgaggctccatggagtggggagactgtggcacaagggaaaccagcccttctgtgacctgctacatgggggactactttgggatagcagattgaggaaagaattggcaagaatgacaacccagaggaagggagggaggtggggagcaaaaaagattactgggaagtgagagagtcagggagaaattgcagctcactctgaaaatgctttgctgctccaagcactattctaagtgtgtgggctttttttgtttttgtttttgttttttttttgagatggagtctcactctgtcgcccaggctggaatgcagtggcgcgatctcggctcactgcaagctccgcctcccgggttcacgccattctcctgcctcatcctcttgagtagctgggactacaggcacctgccaccatgcctggctaattttttgtatttttagtggagacacggtttcaccgtgttagccaggatggtctcgatctcctgacctcgtgatccacccgccttggcctcccaaaatgctgggattacaggcatgagccactgtgcctggcctttctaagtgttatacatatattaactcatgtaattccaacagctctgtgcagagggactgaaatccagccacctgacagaagggaaagctgaggcacagagaggttaagcaatttgcacaaggtcctacaggaagtaagttgcaaggctggtagtgagactcgggcagttggctccggagtctttgctcctaaccactatccacactatctctcatcaaataattcacaggccaggggaatggcactggacagggaaaggctggggacatggaggaacaggctgggatgctgggctgaacacaatccctttgccctgttccaagggggctgggagtcaaggagtcgggagctgagaggagtcctcttcatgctgcaaaaaggctagagaaacgtggtgctcttgtcacttggatctgccacctctgaacacagcagaaatggcaggaggttgtgggcagcaggtgacagaagcccagaagtgaccatggcccaaaccagaccatgaaggagcccagtaaaaactgaggggtgagaacacagtgaccgaatggtgaggacatctgtggggaggacagccccaggtggaaggatgagtccaggtgtttggaatgggggaaaataggacctgcccttggagatgaagaagtgaggctgaggaagagatgaggaggtggaggctggatgagggggacctggcatgcagaggacaggagagcagtgcgggaggaagtgggtggaggctttggcaaaatgagctgagaaggcgaagatggagggaggctggaaggagccccagccaagtcccgctcacaggatggggctagcaggggagggaggcctggcagccatgactcaccagtcttggccaccacagactcgggccccacacgctgcctgccacgaagcccgtagaggttcatcttatacttccggtcgggatccaggccggggacagtaacctcattctcatcccccgcaacaggcactgcctggggctgcccctgtgcatccttgtactggaccatgaatgagtcgaaggggccctgggccactgtccatgagagacgcaaggagtctggggtcacgccggtcactgtcagttcccccaggaggggctgctccaggaactcagggcgggggggctcctctttcctctctggagctgtaaacaaggagatccagccaggtgctgaactggcagcctgggactggggcttggggtttcgacgggatgtcacacctatggggggtggggggtcactagtccattaattcgagtgctaaacttctgggaagcctgacacagccagggtatgacacaccttctgggccacggggagctgctgcttgggatggaaggggcccagcagtgcgggggagtctggctgcccctcagccctggagtggggccgggaagctggagtcagctgtcttgctgggggaccccagctggttttgggctgaagggaagtgtgcatggggctgagaaggggtcacatgggggctgaggtggctgctactcaccagtggtgccatcggccgtgagggggccataccgcttcttgttcgcaattccaaacagagtgaatctgtacttgtggtcagggtccagtgaggagacaacaaatgaacgctcgggcccttccacaggtaccacctggggccgtccatccctgtccctgtactggaccatgaaggtgtcaaactggccctcagggacagtccaggagaggtgcagtgaatctggggtagggtctgtcacccacaggtttcccaggtggggtggagtccctggacttgggtcactctgaggcactaggaagagtgggtagagagaagggagagacttaggtccaaggagaatggggaagccaaatcccacataggaatgctgtgtgaggctgtgcaggttgttcactgcacaaaagtgcatttgctgagggagtacagagggactgaaatccagccagcactctgcttgccgagctgtgtgccctggtgaggagtggtgtccactttaaggaatgggtgccttctttcaaacggcatggaagcactgcgtggactagtgtggctctgcctccaaccacaaaccagagcagcagggagcttcagaaagaggggagcccagccaggccctttcacatctccatagccagggaaatcttcccagtacaacctccactgcttccaagcctaactactagctggcttcttctccaagagaggagagcacaatccttgaagcgttttaatgtgggacagcctccctcatctatgctgcaggcctctcctcctctttgggaactttgacccatggatggactccctcgcctgcagcactgacccttcactccccagcagctgtgccatcagcatttcaacaagctactgtcacacccctcctcacccccactctgtgtgcatctctctctagcctccatcttccctctttgctctcattcccagcccagattccagaaagtgatgtctacactgattgcagccatgtcctcacctccaccaccctcccgatccagctccacccctccaccaggcagcagctctcatgcaggccaggggtggccttgccattgctaaattctgtggacgctccgtagcccttgaatcactgttccggaatctgacaagtccaaccgcaccctccttcctggagtccagacagcaccctccctggttctgcccctccctgcaagtcactccgcaagctaccctgtgggctcttcttcctctgcctccgctgtgagtgtaggctgtcgacagggttccagtggccctgtctcttccccaaccccacacgactactctggtgcctcaattctcctgacctataaagtaggcatgcctcccaggtgtgctttatggggtgtgatgatccacttagagaacatcttgatcacaactgactctcaataaatgcacaaaaggtatttatgtaagtgtctcttagatattgatctaagtttatctaaggcgttgttccccacctctgctgctccctgcctcagggaatgggactgtctcatccagaaccctgggggctgcctggtacaccttgctttccttcgcctcccccatccagccccactgccaccatcccagctgacccatcatcatttttcttttttttgagacagggtgttgctctgtgcagagtgtggatagcacccaggctggagtacagtggcacaatcatggctctctgcagcctcggtctcctgggctcaagcgatcctcccacctcaagcctctcaagtagctgggactacaggcacgcaccaccacgcctggctaatatcttttgttatagtagagatggggggtctcactatgttgccaggttggtctcaaactcctagcctcaagcgatcctcctgccttggcctcccaaggtgctgggattataggcaggatcaaccctgctagcctttaccagctcttaactcacttctccagctagtctcagcagccacccggttatttgcaagataaatatctagtctcatcactctcccactttacccttcagaggccctctaggggccttcgaatgaggcccaagcccctcagcacagcacaggaagccctgagaccaggccctttggcaccccccacatgccctgttctccagccagaggaaactgtaacagtgattctcttactggccatgctctccccaccttactcaccgtgactccctcaggctgcactgagcttctcaaactctttgcctgccccaccactactttcccttcagaattcagctcatgcaccactgcctccaggaagccttcccggagctcccaaagcaggttcccaaagcactgagaaaacctcttcagggcagtacagagggcagggtgttactgctgtcactcacagatcttggcttcagccaccagcggaccatgcctcttcttgccaacaaacccatacaggacaaatttgtacttgcggccaggatccagggaggtgatgacggccgagcgctggggtccttccacgggcaccacctggggctgcccgtccctgtctttgtactggatcacgaaggagtcaaactcgccctcggggaccgtccagcgcaggagcaaggagtcggaggtcctgtctgtcaccgtcagctcacccaggcgtggtgggcctgaggacttcccaggcttctcctcatccttgtctggagtttgagaggcaaaagcaaagcatagtggactcaaccgttctcttgtctgtgtctccttccctctcccctgcccacctcactccatcctggatagatccctccccggaagactctatctgcccacccctcagtgactagctcttctggaagaggggcatttccctctcaatctctgcttcttcccttgtgacagtttctccatccctcacaaggtcttggtctctctgcacaccaggatctttgcgggggtttcaggtccccctggttctgaatgagagtttcaagcctccctgctgcagcatcagagcagtctgaaagctcctctgcccacctgagctgctgtctctcttaccaccctctcttccagtggtgagcttgacctggagctgggggatgagtcagccaccctggtcccacagagaggaacaaagaggggatgtgaaagccaggtaccccaggacctgtctttcactggtcctgcaaacctcatccatgtctgaagtcctgatggctgtggagccccctgccccaaggagccttcacccccagcagaaactggctgatgggaccatggactgctgtccactgcaaaccaggctcccagggacgaggtattgggggctgagggtcagtgtccagaggccttcccatgcccaccctgaaagatttatagggcagggaagggcagaggagcaaccgaagagtgggggcaggggacagggcaaggaaagctgcaggtggagggccagggaccttcagcctctctcctggaatctctgtcccaccctcggcctttttacctctgcctctttcccctctccccacccatccttatcattgttttaagatccccctcgatccatcttcctgctgaacctgcaattccttttctctccttttctcctctatccagccccaaacatcagccctgcccttcactggcccctcaatatccatcctacctctgaagtcccaataaccccagctcctcccccaatctcaggatattgatctgagcagagtccaagatgtacccataatgccttggtagatgatggggtcagagggcttgcccccaggagggaccccatgaagtgacagctcatacggggttccaggagggggtggaggcaccagagcctggcggacgtcccctggcagcacttcctcatgtgcccccggcccctcgggcacccgcatgcgcagttggaagtaggcaaaggtgtcaggctgggcggtccagaccacacggaggcgccctgtctcatctctgcccagcaccctcaactctcccagctcctgggggcgctgctgcaggagaggagcctgggccccttgcgtcgtcgaggggcctgagggaggaggctcatcggtagtccccaagaggcccaagggtgaggaccctgggaaggggcagggtgagaaaaagaggagagtccagtatgagaactagaaaggaatccccagtccccaggttctgccctccagcctctaagagccttgttctacttctacttctggttccctcacctgggccactccctcctcccaaaggtcagccaatcctccaaacacccccatctaccacattcctgagcagacgggcctgtgcttcaggcaggtaataggtaaaataaagcctgctatccttcaccccacaaggcttccatgacctccagcccccggagacttccatgtccctccccacatacatcccccccactgggtggtggtcaggtggcttccattagtgctgcagtgagaagcctggaagaaagacagtggtgttagagagggaggatgcaagaggagagtgggcagtgggaagagagagagggtgtgggggtggacatccaggtcaggtggcatctgggccctatgggggaagaagaggtccaccaccctccccacagcagccacagggtgccctttccccaagcccagacatcgttcctgtgggagagaccagcataaagtgagccagggggtctgaaaagccagcttaagaagcagtggtttcacctccccaatatacagttgctgcctgatggcacccaggccacccccacgcagttctgatgtgtcccttcaaggtcaaggccaaattgtggaaaacagtaaccactaaccacagtcttcagccactctcaccacagtgagtcagaacgggaatcactgttttcaattcccagcccactcaaactgctccagtgaatctttgcaggtgccccaaccacatcaccctctattgcctaaaataacaatcctggaagtgtcccgggaaaccccaaagaaggcgctgccttgaccttaggcatccacaggatggatgccaggaccctggggtggggacgtcttctagggacaatggactcgtgctttgtcctgggggccccctggagccccggccaggtagggcctgaaggtagaagggggcagtggggggtggcagtgggaggaattcatgaatgcaggctccaacggcaggtgaggctggacaagggataggtgtcccgtggccccagcccacactacctgtggtggtgatgaaggcgtaggacttggaggtctgccccgcccgcaccccgtggacctccacgtggtaggtggtgccgggcctgaggtcgggcaggctgacggtgcgcgtggtgcccggcacagtcagctcaccgccggggccctctgcaggcggctgaggccgccagcgcagcaccacgcgctcgaactggccgcggagcccgtcgagagacacgagaagcgcgccatcggcggaactgcccagcacctctggcttggggtggcgggacgcagccacccggtcgacgccttcaggcgagaggccgtagattccctggttggagtcccgtttcctggtgccgggatcagggctggcggtggggcgggggtggcggggcgggggtgcgggggagccggctggggcggcggccaacagacgccgctgcaagtattcatggatgtggcgcgccaccgacgtgtaagtctggttggcccgcagtgggtagccgtgagcccgcaggtggcgctccaggtcctgcaccgtgccgcggaaacggctcagctcggccgtcaggttgccccaaggccgccgtgggggctgggacaggcttggcctgggcggggactcctcctccctttcctctgctggcctcgagggccaagggggccgtgggggccgcggggctggggctggccggggccgggacttggggggcggggctggggggcgcacctccgggtaactgtagtggcctggtgctgccaggggcaaaaaaggggagaacaggtcagtggcagctccctcccggcactccttcccgcggcagcccctccctcgatccctcccaccagagccagaggcctcttccctgtgccccagccccacctggaaagagaacggagggaaatcggtcagtgtcccgcagcccccccattcccctccaagcccaccactgttggtgccctagaaagaagagagaagcccgtgggtggggccctgtagctgaaggagagaaaggggagtcggggaagagaacatgagctacagcgaggtgggtgtccccctgtcacaggaaaagaaaaatatccaggtatctgttaagaaacctcgaggtttagtggaaaatcactgctgtgagacccacctcccagcaatcccaatccaaaagtcaacaggactgatgatctctaatctgcctaattccagtcccacaagatctatcagcacaaggcctgtcccggtacctaaatttaaaaaagaacctcccttaactgactggatcaggcagcatctcctattcacttctctccctggggccattcctttcataggctaacctgtaaccttcctacaggactccaggcatctgagggctctgtctccccagtggcctcaggacagagcaaggcccccagcaggtgcctcgagactgccacacacctgccagaagcattcagaggagtctgtgagccctgagcctgggctcctgaggaggaggatccaaggctgggaaaccagggcccttccctaacctctggccagccatacctgtgttggccctgacagaagctgggtagctgactgcccggccccgctccgctgtgacagtcaccacatattctacgcctggcatcaggtcagtcagcagcgtcccgtctgcttcagggggcacttccagcctcaccctctggttgccggcactgacgtaggacaccacaaatcggtccacctcagcctggggacgcagccagccaagctccagtgttgtcggtgtcacagccaccactcggaggtcctggggcccatcgatcactagccaggttaaagaggaggactcaggtgggtgtctggttcttcaatcatcatctttccttccaagagcctagcccccatccagccccttccttctgccctcccggagggcagattccctctctagtccagatctccactcaggacacccctccccacagccccagctctcactggtggtgatggtcttggaggcaggaaggccccagctggtccctcgaagggctcggacagtgacctggtactcctgtccaggggccagtcctctctggtcataggctgaggcagagcttggaacccgtgctgtgaatggggggctcgccccctctgtctgtgagagagagcaccaggtggctcaggggctggcactcttgcctctgctgctcaatcccccttatctcttctttctccaattctaaacagtgtcagcatggtactgtgtggaacttgaccctgtacaagctggggagcaaacatgctgagagcgctaactccttgtgagccactgttctaggcgaggtacacacatgaactcacttaattctcacaacaaccctacgaaacaggtcctattagtcccattttacagataaggaaactgagacacagaaggacaagtatcttgccaacgtcaccaacaccaagaaaatggcaagaatttaggccctagcagtgtgatcccagagtcccctctcatgggcaccccctatttatctgtcagagtcccctctcatgggcaccccgtgttcatctgccagaattccacccaacatgcaccaggactctccctccagctttgccctggcaactctgactacctgggcatgaggagccttttcctaagcttggtcctgtcagaacaaatgaagtagatcaaggatgccccttcaagttgcactttctccttaaagggtctgcctcaccctgaacctcctcgtagatgcctgctcatggctgtgtaacaggagtgggacccgcatcacaacctttcccttgagggacttttcttgtctcttcacccgggttgtaggctcctcaaaacaagaaccacctgctcaaagttccacaaatatgtttcctgattgttgattttgtacctggcatcatgctgggcattggagacacaaaaataaaatatatggtccctgtcctcaggtagctgagactctaatagctaaatgtatggccacatcttgaatatatgagatacttacaacaatctctatgcttagcaaatgcttgtgagaaaacaacactcctacaagtgtacatttaaggaattatgattatgtgtggtgcctccaaagggaatctactggaccctgctccaggcagggtctcctggaatgcccaccactggggaaacaggaggaactgtacatctgtgagcattctaacagccccacattttgctgtgctgtccagctaggacagccgctaaggatgctgtgttctgcctagctatgttggctgtgatggggacacctccattcagccaagtaggattggaaatttcaaaaggtactctcctaaaccaagagaactgtggggaaatcaacatagtaaataccgaagtataaaaccagatgagaaggccacgtagagatttctgggttgaggatgaagtaaagctttgtcagttttctgggttgaaaagttttcctgggcacataggacctccagccctctcctattcaccctgccttagaataccccagcctaggaagccttgggttggcctcaactcaagacccatgaaatccttacccttcccagaatttatttgttcattttctctgtgtgtgtgtatgtctctttctctttatccacacccaccccatccccacagccgcaatacacacaccttggatgctccctgatgatgtctggttctttcagtgaggcaagcctatccccagagttctccttctccctatatatatcctttagacacttcttggttcctcctgagatccatctgggaacagtcccctgaaagtccatcaacctaacccatgtctcctacgtctcctagcaccatcttactggtctgaagcaggctttcttttttctttttttgagagggagttttgctcttgttgcccaggctggagtgcaatggcgcgatctcagctcatcgcgagctccgcctcccgggttcaagcgattctcctgcctcagcctcccgagtagctgggattacaggcatgcgccaccatgtccggctaattttgtatttttagtagagacggggtttctccatgttggtcaggctggtctcgaactcccgacctcaggtgatccacccacctcagcctcccaaagtgctgggattacaggcgtgagccaccacacctggccctgaagcagtctttctaaacagatgctggcagctggctctgccccttggtaaagcttggctgcttcactgattttttttttttttgagacggaatttcgctcttgtctcccaggctggagtgcaatggcacgatctcagctcactacaacctccgcctccaagattcaagggattcttccttagcctcccaagtagctgggattacaggcatataccaccatgctcagctaattttgtatttttagtagagatggggtttcactatgttggtcaggctgttctcaaactcctgacctcagatgatccacccactttggcctcccaaagtgctgggattacaggcatgagccactgcgcctggcctgcttcactgattttgttcttgggaagttttagagtttatctcaatattaacctcgtggctccagatgaactctaccttggctggtccttggagcttatctcaccctcattgctgtttttagactagacccaagcaaaaacttctctgaggctgtgaggttttgagtcccagtgaacacttagcctagccctgatttccaggctgcaggacacacccagacaaggaatatctgaacctctttctcattcaggaactcatctccctcagtttccccatgctttctctcacattcatagtggagctagcactttgcaaaatagcaacattccttcacttagggggcctcaggctggaggggcatcagaatcacctggagggcttgttgcaatacaggttactgggctctgtgcccagactttctgactcagtagatctagtgggggagtctgacaatttgcatgcctaacatactcccaggtgatgctgatgctgcaggtccagggaacacactttgagaaccactgagtcagagtaacagtgccacatatacagggagaggagaaactttcttcttctgcattctgaaaaataattccaataactaggtatgtcccttgatctggaatagcagagtttgggctttgagagagaagtgcttctgggaagagggaaggtaagaggtagagataggcttctaggatgacagcagcagccagaggacagacagctattgaatatactctgtacccacagaaatggacaaagggtagctgggcattgtggcaggtgtctgtaatcccagctacttgggaggctgaggcaggagaatcgtttgaacctgggaagcagaggttgcagtgagccgagattgcgccattgcactccagcctgagcaacaagagcaaaactctgtctcaaaaaaaaaaaaaagaaagaaagaaaagaaaagaaatagatggcacttgccaaggcagaaggtacgatgccagggaccagctacagacagcagaaagcatggtctgagggtgggtagcccaggcccaagaggagtgtctggggaccaattttacaggagtgttttccacacccaggctcagagaagacccagaatgtgacagatgcccataccgagagcagaatggatgagctaagaacatggccaagcctggcacaggccaacttggcaccaccatcctggctctgagtgagggagaaagtctagggcttcaactggaaagcggcgcccttgacaacaccaaggatcggtttgtatttatttactcagagcaggagacaactgctgccctaaaagctcctcttatctcaagtgtttattttaattcttctttccctgaaatttcttaagaaacttccttttcgaagtcccaccctttcaagattagagctatgtaaataatatatacagagaagaagagagtgggagaaacactttaaaatgttagcagtgcttgttttagtgaggagcagccaggaattgtttttcttttctctagttgccaaattcttgtctcgtgattaaagtatttttataacaacaacaaaaaaagatgtttaaacagaagaaaaaattcaagctatcttggttgcgccacgaagttgagatttctgcttctgctttggctggagagtgaggagaggcagaacatagtagggggctggcctgaggagcataatgacaagacaaagcaaagtggagtgaggatgacagttcctctgagctgtccccttctgtcctagtgccttccgaggctttaggcccagggagttgtttatttttacagagtcctggctaagctgatgaagatgaggatgacatggcccacaccccatatggcatttgtgggatgatgcaggaaaacatgagttggatggtagaaatgtcagaagatttgcagctggggaaacgaccatatcttaaaagcccagtctgcacaaagggaggccccaaataagtgaccacaaggctttgtccttagggtgttccctctaatgttttaagagcaagttggatggccaggagtggtggctcatgcctgtaatcccagcactttgggaggctgaggcgggcagatcacttgagcccaggagttcaggaccagcctgggcatgcaacatggagaaaccccgtctctactaaaaatacaaacattagcaggctaaggtggtgcacacctgtagtcccagctacttgggaggctgaggtaagaggatgacctaagcctgggatgcagaggttgcagtgagctgagatggcaccactgcactcgagcctgggccacagagtgagactctctgtctcaaaaaaaaaaaaaaaaaaaaaaaaaaaaagagcaagttggagggagacagagaaaaaactggtttgcatgtactgatgacaaggaggtgggagatgaagttcacagactcaaaattattgcaacagcctagacagcttggcccaaaccaaaaaagataacattgaacagggccaaatgcaaaggcctatatttaggtgaaaaaaaaaaaagtgtatatagttgaatgttgtcttctttccttccatcttttttccctgctaatctgtattttctaagttttctgcacggggcctatattacttttataattaaaagttacttaaaaaaccaaatatgaccaaaacagctgcctgcttgtgtgactacaaattgctatacgccagctctgagaaaagtgtccataaattcagagtaagtcagtgggcccctctctgtccccacattttgggggcacatgaaaaaagcaagaatcacaggaaggtaaaggattcagagaataaagacttagggaaaaggggcgaagaaactgggaggttttgcctgaggaatgaagacatcaggctggtgtctccaaatacctgaaggcctgtggtgtaggacacagggaaagcaaaaaacattccagctgctgatgaatacccagctagggccaacggacaggtgctagaataggggcagacggattctgcaacaatgataacagctaacagtgatgaccaacaatggactggacagcctcaggaagtactgagctctctgttaccaggtgttccaactgtgtgggaccaatgcttgctggagatgctgcagaggcctcagtgcccagtgtcaagcaggctaagaaagcctttacagcagcttcaggtacccagccatctggactcaaccaatgatcacctggaacttcctccaggaggtgagccctgcccccctgtcctgcccactcagtcccctcctggagcctggcatctctctcaccgtggggatgaactgaatttcataggcatccacggggccaggagccggggtccactctgtccgaactgttgtctcctccaagagatgcatcctcatgccctcaatggttggcacctctgcccaagagaatgggttagggaaagctggttagcacaaggcaaccacccccacccacagccccttttactcagggacatcgaagaggcccatcctaactcccactcctctctgctagtggagaatagctgacagagggctgaacggggcttggatcgccttcaccttctctccatcttcaggagcacagaatctccctaaatgcaactaaatgggccccaacctgctcctcagagatctgaaggccagtcctgcccactggaaagccccacccctgtggttctgctgcccctggtgggcactggctccttggaatgacatgctctccctccactcttcctcaggctcaggtcttccccatggctcctgttcacagaatcacagtcccagagtacactggggaaggctgcctgctcaccttctccgcagtcttcgccagcatacccatctttgcagacacagctgccatcgtgacactctcctcggccacggcagtcccctgggcatgtctggatggcacagtcagggcctcggaagccctctacacacacacactggcctgcccggcacagttcccggggcccgcagcctccagggcaggcgctggctggaggctcttcctgcccgcagtcctcaccgccatagcccacgtggcacaggcacactccttgcacacaccgcccacgtccccggcagtcagccgggcacatgcgggtggcacaggtagggccggtgtagcctgggtcgcacaggcagcgcccttcctcacagcggcccctcccgtggcagttggaggggcaggtgcggatgctgcagtcctcactcacgtagccttcccaacagatgcacacaccgtcctggcacacgccgtgctggctgcagtcattcgggcactgcctcacaccgcaatcctcgccagagtagccgtcctcgcacacacaccgcccatctaggcactggccgcggcctcggcagcccccggggcagctgcgcgtgctgcagtcttcccctgagtagcctgcgtcacacacgcacacgccatcctcgcaaaggccgtgcccacggcagtccccgggacagcgacggctcccacagtcctcaccggtgaagcccgggttgcacacgcagcggccatccacgcagcgcccgcgcccgcgacagtcgccaggacaggcgcgcgtgccgcagtcccggcctgtgtaccccggccaacacatgcagcggccactctcacagcggccccggccacgacagtccccaggacagctgcgcacaccgcagtcctcgccgctgtagcccgcattgcaaacacacacgccgttctcgcagcgcccgcgacctctacagtcgcgtgggcaggcgcgcgagccgcaatcggttccagtgtaccccggccagcacacgcagcggccgtcctcgcagcggcccctttggttgcagtcgccagggcagctgcgcacgccgcagtcgtccccgctgtagcccgtgtcgcaaatgcattcgccgtcctcgcagcgcccgcggccccggcagtccctcggacatgtccgcgtgctgcagtcctcgcctgtgtacccgggccagcacacgcagcggccgtccacgcagcgcccgccctcgccacagtcccaggggcagctccgcgtaccacagtcctcgccagtgtagccggggtcacacacgcagcgcccgtccttgcagcgtccccgctggctgcagccccgagggcagctcctcaccccacagtcctcgccagtgtagccggggttacacacgcagcgcccattctcacagcgccccctctgactgcaaccgcgagggcagctcctcatgccacagtcgtcaccagtgtagcctgggtcacacacgcagcgcccaccctcacagcgtcccctctggctgcaacctcgagggcaggagcgctggctgcagtcggggcctgagaagcctgcccggcacacacacacgccctgcacgcagcgcccacggccttggcagtccccgggacaggatggccagccacagctggggccagtgtagccgggaaagcacacgcaacgaccacggacacagcgaccctgatcattgcagtcatctgggcaggaccccgaggctgagggtggggaagagggagggatctcagcatctgtggggtctgagcaggtgggcccaccccagcctggctcacaggaacaggtgcagcggctcagatcaaacacaccatggagactgcagagggtccgcacatctgtctgacctggagtaggaggggagaggcaagtctcagtctctctcctgggagagaggctgagcctatgtagtgctcctatgtgcaggcccctagccaggctagcctcatctcataaggccatgtctgctcccagttgctagtatgtgtaatgtatgcagcctctcagggccctcgcatatgctttggttgacatgtagcccagctctgctctccaagttgtgttctgggctgcatccacacccctcatggtgaggaaggagtgccttcttctaattcataccaaggacctttatggactagcaatgcccaccccaccccacctctccaccctcttctgtgatcacctgctcacctgtgccagcttgggcagaggcaggacaacatcccccagtgcactgttccttgagccccttcaccaactcctccaggatctctagacggaccctcagggcctgtacctctgaagcaaggactgggggctcggtgcctgggggacagccacagccagtggaagggggcaggttaatgcggtgggtgaataccacctgcttctcccctccttccactgtgtgctcgtaaagctgagaagaggggcttcccactccagcccccactgtgtggccccctggctggggagggggccggggggctggcagtgtcacattggaccgtgaagagaaggggcctgctctggctgtgctcagcagcaccaggagaaccaggctggaggttagagcatactgggctggcatcattcaggaggctgcagggagaaagggtaggtatgagagcagcttcaaaaaggagacaaaatgaatccccccttctccagcacatacccacggtcccaccacccacaagtaatctacccaactcacatgcatgtaaaaattcacattccgcccaaccctaaaggataccctccctgggcaagtctgttctctacctctctgatatcatttatttaccctgctcctcacccccttttctattgtgttctcctacactggtttttttgttttgttttgttttgttttgttttgtttgtttgtttgagacggagtttcactcttattgcccaggctggagtgcagtggtgcgatctcagctcaccacaacctccgcctcccaggtccaagcgattctcctgcctcagcctcctgagtagctgggattacaggcatgccccaccatgcctggctaattttgtacttttagtagagaccgggtttctccatgtcggtcaggctggtctcagactcctaacctcaggtgatctgctcgcctcagcctcccaaagtgctgggattacaggcatgagccaccgcacccggctctacactggtcttttgtttttcccacgagcactacaagctctcactactccaagggcctttgcattgtgtgttccctatgtctgggatgctcttcactctgctcataaaggctggctccatcttcaaatcttaactcccagttagggcagtcttccattactctctatcacaatatcctgttcctgttcttcatggcatttactgctgcctgagttatcagtttacttattacctttctctcaatgctacaatgggagctccatgagaacaaggacctcatctatcccaggactgctgtatacttgtgtctggcacataaatgttctatctgacacatcaatgttgaatgaattagtggatgagtacctagggccaatccttccccaaacacctggatcccagctcctactgtcttctaagaaaagtgcagattatcttctccctctctctctcacttttttttttttttttgagatggaatcttactctgtcgcccaggctggagtgcagtggtgcgatctcggctcactgcaacctctgtctcctagctcaagtgattttcctgcctcggcctcctgagtagctgggattataggtgcccacctccatgcccagctaatttttgtatttttagtagaaatgaggtttcaccatgtaggcaggctggtctcgaactcctgaccacaagtgatgtgcccgccttggcctcccaaagtgctgggattacaggcatgagtcaccgcacgacctctttctaatatagagacaggatcttgctcaaccccctggttgaagctggacttgaactcctgggctcaagccatcctcccacctcagcctcccaggtagctgggattaaaagcatgagccaccatgcttggcttctctctcttttttattcaactcctcactctcaactggatccttgctcaaatatctccaattgaaaaaaaaaaaacaaaaatcctcttcctcaggacttacatgatcaaatatcaagacttattttaaaggtgcaaggatagacagatgaaacagaatagggcccagaaacaggcccacacatatgtggtcaactaattaacgacaaaagtgcccctgcagttaagaggagaaaggatggtctttttagttcctggtgctgggtcaatccaacatccctaagtaaaaaaaaaaaaaaaaaaaaaaaaacagtcattctccaccttatgtctgatataccgaaattaatttgagatgaacccaggacctaaataagaaaagtaaagcaatatctttcatagcaatatcttacagaaaatttctgaccttggagtaagcaagatttctttttttttttttttaagactgagtcttgctctgtcgcccagagtggagtacactggtgctatctcggctcactgcaacctccgtctcccaggttcaagtgattctcctacctcagcctcctgagtagcggggattacaggcatctgctcccacacccagctattttttgtatttttagtagagacggggcttcactatgttggccaggctggtctcaaactcctgaactcaggcaatccgcccgcctcggcttcccaaagtgctaggattacaggcttgagtcactgcacccagccgcaagatttcttaagtaaaacacacacaaaacctaaccataggccgggtgcagtggctcgtatctgtaatcccagcacttcaggaggcttaagtgtgaggattgcatgagcccaggagttggagaccagcctgggtaagatagtgagactctgtctctacaaaaaacaaaaagaattcactgggcgtggtggtacacctgtagtcccagctactcaggggctgaggtgggaggattacttgagtctgggaggtcgaggctgtggtgagctgtgatcatgccactgcactccagcctgggcaacagagctgatactctgtttcaaaaaaaagaaaaagaaaaaaacaaaacaaaatttcaggtcatcaaattacatcattaagagaataagaaggcagctgggtgtggtggttcacacctgaaatcccagcactttgggaggctgaagtgggcggatcatgaggtcaagagttcaagaccagcctggccaacatggtgaaaccccatctctactaaaaatacaaaaattagctgggcgtggtagcgggcacctgtagtcccagctactcgggaggctgaggaggagaatcgcttgaaactggaggcggaggttgcagtgagctgagatcatgccacttcacttcagcctgagaggaagagtgaaactccatctcaaaaaaaaaaaaaataaaaaaaaaatctctgcaaaacaaaataagccaaaatcaggaaacctagttttttaaattgtcaaaagacaaacaggtactccagaaaagaatatagccaaagagccaataaacattttatttattttacctgggctcaagtgattctcctacctcagcctctggagtagctaggatacaggcatgcgccacatgcccagctcattttttttgtagagatggagtcttgctctttcgcccaggctggagtgcagtggtgcgtcttggctcactgcaagctctgcctaccaggttcatgccattctcctgcctcagcctcctgagtagctgggactacaggcgcccaccaccatacttggctcatttttttgtatttttagtagagatgaggtttcaccgtgttagccaggatggtctcgatctcctgacctcgtgatccgcccaccttggcctcccacagtgctgggattacaggcgtgagccaccgcacccagccttttttttttttttttttttagtagagacagggtttcaccaagttggccaggctggtctcaaactcctgacctcaagtgatctgccttggcctcccaaagttattaggattacaggcatgggccaccacacccaccctatttcattttattttaagataaactctacctctgtcacccaggctgaagcacagtggcacaatcacagctcactgcagcctcaaactcctgggctcaagtgatcctcctgcctcagcctccagagtagctggaactacagatgggcatcaccatgcctggctaatttttaaattttttgtagagatgggatcttgctgtgttgcccaggctggccttgaactcctggcctcaagcaatcctcctgcctcaccctccacagtagttgggcttacaggtgtgagccactgcacccagatccaagcagcattttaaaagatgcacaaaatcactagttatcgggtaaatgtacgttaaaaccacaataagatgccactaaatatcctccagaatgcttgtccctcttcaaagaggctgtcattgcttgatattggcaagaatgtgaagcagctggaattgtcatctgttgcaagtgggagcatatattaatgcaaacactggaaagttgtttggtagtatctgctaaaacatatagtctataacccagatatctataactaaatatccggtgggaatgactgcatagttcttccaaaagacgtagaccataatgttcatgagatttattcctatattagctaaaactgaaagcaactcaagtgtccattcataaagtggataaataaattgtgccagagtcatacaatggaatactatacagcaataaaaaacaccctattgctacatgcaacatgggtgaatttcacacacatagtgctgagtaaaaaatatcacacacagaaagagaatgctcttatactcttatatacccttcctgagctaccaaaaaaagaaaaaagaaaaaagaaaacactctgaataatgccgtttatatgaggttcaaaaacaggcagaggctgggtgcagtggctcatgcctgtaatcccggcactttgggaagccgaggcgggcggatcacgaggtcaagagatcgagaccatcctggccaacacggtgaaaccctgtctctactaaaaatacaaaaattagctgggcatggtggcacacacctgtagtcccagctacctgggaggctaaggcaaaagaattgcttgaatcccagaggcggaggttgcagtgaaccaagataatgccactgcactccagcctggcaacagatcaagactctatgtcaaaaaacaaacaaaaaaacaaacaaaaacaggcagagttaatctttgcttttagaagataggatcagattacttgtagggattattgaccggaaggagtcatatttctggaaatattttgtatcttaatctgggtggttacacagatatatacatattcaaaaactcattgagctgcacacttaagactttggcattttgctgtataaaaattgaaccatggctgggtgtggtggctcatgcctgtaatctcagtactttgggaggccaaggtaggcggatcacttgaggtcaggagttcaaaaccagcctggcgatcatggtgaaaccccgtctctactaaaaataaaaaataaaaaaaaattagctgggcatggtggcaggtgcctgtaatcccagctacttgggaggctgaggcgggagaatcgcttgaacctgggaggcaaaggttgcagtgagttgagattgtgccactgcactccagcctgggcaacagagcgagactccatctcaaaaaaaaaaaaaaatgaaaccttaaaaaacctatccccaatctcacaccccctccagccaccacatatttctctcctctacttcatggccacagttgtcaaaatttatttgtatttgatgtttacatttccttatagcctatgcatgcctcaatccactctactccctccaacccaccaaacagctccctctagggcttcccaatgacttcggtgccacaaaatctaagggacatttgtcttcatcttgcttgacctttgacttctctcaaaatcactagacacagttcaccgcatctttttttttttttttttttttgagatggagtctcactctgtcgcccaggctggagtgcagtggcacgatcttggctcaatgcaacctctgcctcctggggttcaagtgattctcctgcctcagcctcccgagtagctgggactacaggcacccgctaccacacctagctaattttttatttttagtagagacgaggtttcaccatcttgaccaggctggtcttgagctcctcagctcaggtgatctgcccacctcggcctcccaaagtgctggggttacaggcatgagccaccacacctggcccttctcttttaaaacattctgtatccacgctgaccaatatggtagccaggagggatatgaggctctgcaacacttgagatgtgactagaacgaccaagtaagtgaattttactcagtatttttaaaagctccccagatgattgtaatgtgcaacaaatttctactaaattaatagacctactgctctagtcatccacctggtaccttcatccagacttataacttcaatttccaaactatacaccaatttgtaaaacaccccagtcatcttcctctcgctccacagcaatatatccacctgcctacttggcatctccacttgggcacctcaaattcaccatgcctgtaacctgaactcacggtcaccttcctgtatcccatcccctcccagaattccccattgaagctcaggaccccaccattcatccagctttacaagccagaaacctaatagcccattcaaggctaccatatttccttgtatctacctgtattttctcataaacatctctttaattcatttccttctctcccacttaccttcattctaatccaagcttccatccgcctcttgcctgacaactgcaattgcctcctggctgctttttttttctttttttttgagacagggtctcactctgtcacctaggctggtgtgcagtggtgcgatcatagctcgctgcagcattgacctcctgttgctcaagcaatcctcccacctcagcctcctgagtagttgggactacaggtgtgtgccatcacgctcagctaatttttaattttttttgcaaagacaggatctttctatgttgctcgggctggccttgaactcttggactcaagcaatcctcccaccctagcctcccaatgtgctgggattacaggcgtgagccactgtgtccagccctgacccttccctctgcttccactcttgccctctacagtctcacaaacgcaatcaggatgtccctatcctcaaaatgcttcagtgtctcccttccaaattctcttagaacactgacaaacagccctaccatcatgtatcccctgctcccacttcaccacccataacatttccctccctccctccattccagctccactgaccttcaagtccctcatactctctgtgcccatccccaaccccagatctttgtatactctgttccatccgtgtggaacactgttcccttctctcttggccttctcatccttcaggtctcagcccgccatttttttcacagggaagttttcctgaccaggtcaggtcctcctatcatgtgatatcacagcatcatgccattctcatgtgtagcgtttataacaatttgcaatcatatataaacaaatatttttttgaagtccaaagtaataataaatatactgtgagattattttattactttcttgcccactagactataaagtccatgagggcaggcatggcacctatttttttttcttggctgctgtatccctgcatctggcacataactggtgctcaataaatatttaccgactatatgaatgaatgaaaagttcaatgtaaacgcaggactagcattaaggctggaaccaagggcaggaccaaggtcagggctaggaccacggacagtgtctgggactggaagttggttagacacagccaccagggctgaggcagaatcagaggccaggccagggaagatcctggcaggaccagatggtacaagcactttggaaaactgtttgacagaatctactaaatgtactaaaggtgaacacatgcaaaccctatgaccccgcaattccactcctaggaatatacccaacatagctcataatagccccaaactgggaactactcaaacatttcacatcagtagaataaataaattgtggtttattcacaccgtggaataaaataaagcaggaatgaactatagttatatgcagtagtgtgatggatcttactaagatgatgttgaacaaaagccagacacaggaaagagcatgctgcacagttctatttatgtgaagtttgaggagaggcaacattaatctgtagtgctccaagtcagaagtgtgatactcttgagggggtagtgactagtaggggcatggggcggggggcttctggggtgctaaaggtgtcttgtttcttgatctggatgacggttacccagttgtatgtgtttgtggagtttactgaggcagggattggggagcacacagagacaagaggtgggaggaaaggtggtaggggggtcccaggataagacaggagacagggctatggcaaacctgagtgtgagggggccagtcaggattcagctagggtgaagagttgaggagagatgttgaaaggtgcccagctcttccagaccagaggctggggaaaggaggagggcagggtgggtgtggaaatgctgaccggtgaggagtgggggatgtgtcactggtaggcggaggtgactgtgacacacacacacctccacccaacacgcacacatcttctggctttctactcttaaacttttctcctggatcagagaaaaaggagtaattggggctaccagccatcacattctgctaccagccagcaagagacggaaagggagctgaacagggacagagtgtttccacaccaagaggctccccacccaagaaagcccaggccgagaggcctggcatacagagagctgccctttcctgtctccccagcccttctgtcagcctggagtgtagccttgggtaagagatgggctctgaccgaccctcaaatcctgtcactttgtgtctaaggccatgctaatcactcccacaccctgggaatgcttgcacaaagatgtgtacacatgtacacttacaaatatattaatgtgtgctcatccacaagtacaaacatacctgcacagacacacaaatccacccccaaaacctgcatccttgtaggtacacatatgggtgcccatgcacacacgtgcacacacacccaatctccccttcaggtttcctccacacctagtcattgggtgatgcctaagaaggctgatttcttgttggctccgagggcagctctgtgagtgaaagaacctggatggtgtgagaggaacaaagcaggaggcccttcccagtgggaagcagcggacacatggcctccaccatacttccccgtacccctggaggcctctgtgagttgtccagtgcccctccccaaataagtggattcctcatctttccctgcacagtgggggaaagcagagagggtctttgcaccaggaaggagtgaagagagctcaccagcttttctggaaagctggtgagattggtctagaagagcagagcagcctccattgaccacacacccagaggctccttcccaatctccctccctgccctgttgccaccacccagccctccagctccccattccagctcctgggataattctgctcttctctcggtactgggcaagcaaagaattgggtgtctcttgtgtctccccttcaccattccccctgccactatgtctggggtggttctctgtagtgtgtgtttggagagagatatggcctcaccctcttggcaccctccccacagttggagggctggcagggatgggggcatcttcccaaactgtgactcagcttcctgggtattttgtgttgtagccaactttgacactttgctcattagggactgtataggtcccaaggggtggggagaggggctggcttccataaaagatgttccacagatgggggttctggtcctgcccccatgcctccctctgaccctcctgctacaccctcagttgaatctggcaatgagaggtgaaggtagaaggattctaggagtgagactaaaaagggaatgtgggggtctcagatattgggctggaaccaggtaggaaggaggtgtcagggaggggtaggttggggaatccagataccccttattctggggagctaatcggcctgggaatggaaaaattaagagaaaggatttccaggccccagctgaaaatggttaggggtgcaatgagagacaggaaggcagtttctggtcctgcacctagtggctaggtctggagtgagcaaaggaagtttgaggaattgaggtgctgggtccccagggacttgaaggcagggtcagggaaaagaggaggggctggagatgcgggaagcaggggcagggcaggcagcagctgtggtgtttccgagttgcttcccagtagttcctctcagttccacttccagttgtttctatgccattaaattctttccaggcgagataaggggcccgcccttcccacccggggcgtgtcacgtgtactggtggtggggggcgggggcggcgaggtgagggagagtgcgggttcagacagacagaggcaaggggagcctggaaggggcacagagtgaagacggagcccctgtgcccccagaggcatctctcagccatcccagccctgctgaaccgtgagtcatgagtgcagagctctggccaagaacaagttttaggatcctctctgcaggctctgtgcacgtcccagacccgagtcctgactgtcccatttcagtatttcctaaagagatctcccagacctccctccctgcaactctcacgctgccacctagggagtccccatttggatgcccaaagaagcaccctctggcacctcctggagcctggagcccccagagcctgggctcagctgctctagcccgacatttgggattccgcaagcactttccttccaaggttcagctggccaccagttcagcctagtcctatcttcccgctagccccagcacctccagggcccaggggctcacctcaccaataaccacctctaccctggttccaccatctgactcccggagtccctcggtttgttcccagcccctctcagttgtctgcatcccatccaaaccctgacacatactgcccaccccaacacacacataccaccctctcctcccagacactccttcacagggagcctggttcccagcgaatgctcctatgtcctctgtcctgaacagaagtccttgctctggaagcactgctgagagctcacctgccacaccttcacctggggcatggggataggcgagaaatcccttgcctctccttctgggtctccccagaactctgttccttacctgggcaaccgagcagctgcagtgcctctgcacctgctctgtccccaaccccgggagggcggcgtctcagggcaggacagggaagtctccctcacttgtcccctgcaacaggggctgagccacaaccgactgtggatctcggcagcgacagtgaggagggagtctgcagcgagcaggggaggagaaggggaggaccaggatgaggtcagggaggggagcggagatagggcaggtcctcccacccctcccaggccctcccacatgccacccctcctcttctcctgcccccaccccagcccccactccctgtctagcatcactgtctcaccataccctcatctcaacccccagccccggtcttacctcccacgtcctttccctatgccatttttagctcaccctaatttttgcccaacttgacaccccccacccttcctgccatttcttttttccccaccatttctccacctgctgcccctcctctctgaccccagtggtttcctctcagcctatatccttcctcatggccagcccccttcccctccctcccccatgctcctctcccatctcttcccagccactgctctagcttggatctctggatcgcaccccatgtctatcacccagtgctggctccctcatcctctcaccagttctcccctggcagtctggggcagggagcaggggcagagggcaggaggcaagaggcaacctctttctccaactgggaccgtctctgggaccccaagtccccaccctgctccagtcccaccatttctatcttctcggcttatcccgtccccgagccactcctgctgtctgttctgttcagtccctctcctgtcactgccccctttgcattctcctacctcagcaagtccctagagaaagagcaggtgaggcttgggcactggcagggcaagggcttgggtgaacactgggacatacaagccttggggaggaagctggggttggggcggacaaggaaggaaagcctgaaggttaggaggaaggtttagggttgaagaaagggctagagacaggaggcaaatataagggtgggtcacctgaatagagggtgaagtggtggaaagcagggtggggggctggtgcctgggtgctgcgggggagcaggaacagaggcggggagaggtaggggctggaggaaacggacacgctgtctctggtcccaggcagaagactgacagccagaggacaggggggacagggagacagacacaccccacataagtctgttgggtgtttccctagcttcatctccccatgtgctgccctgacaaggagctgaaaaagagactttgctacagaggagaaatatcccagctgagtgggaacccactacccccagcttcacagtgaggactgggtctctctatcctgctacagacctcaccactgaggtgtaacttggccaagtcacgggtgaaaggtacgtgagggagcccatatgtgcttgattctgccacatgggtgacggcccaggtgtctgcacaccaggtcagatccccatggtggcaggtgtgtggtgttcctgggtcagggcgtgcctgcactgcatgtggctgtggccagatgcccagtaagctccatgtggccgagggcaaaggcacacatgggcttttgcgtgggtgtccccgtgtgtgtccgtgtgtctgggtgtgtgtggctgtttttttcctggctttgatggggaggatgaagtcagcatcttggacagagccaggctcagcttccttcctctgccttggcctgaagcccccagagccagcagtaggtagcagcttcccaaggatctcctggcaggaggtggggagccctgcagtgataggaagagggagggtctggagacagtatcacacagagggcagaacacagggtatgaatttcctctgacaccttcagatttctgttccatggtcatatcctttagtgtgtgtgtgcacgcgcgtgtgcctatgccctatgtcctggctttattatttaggaagaatggtcaacataagtacatttggcacagagagtggccagggacctcagagaagacagcaagaaggatggtcctgggatgttctggaagcccactgttggggtctcagagagaaatgtgggattccagatgtacacaagcttataaggcatttggggaagccactggaagcttagcagatatagtttcaggttctgaaattatctttgtttaccatttgattcaccctttggtttccaggctcatggagaagctcatgtcttgtatgttcacatcttgtaagaaaagcaccaagccttgcacagtgtaggtgaccaataaatgcaagtcaacactgaaatgtgaaaggactgggagagaggagggggaaagggtaaggagcccaggcgtgaaggcagggaagcccagtggtcagagctggggttggcttcactgaggtgtctgggtggtggtgggtagaaaggtcagtgttgtccagaactgtccacaagctccggctgttctctgtaacctcagtccctgtgtcttcagctctgagcctccctccttgaatgatcctccaagttcctgtcctgacctcaggaggaaaagggatgaaagatagagaaaaggaaaggaaagatagggaggagagaaggcagacacataagagtaagggcaattgagggcaaggacctgaaggatgaagacaggggaacaagagatgccaggggctgcggtccaagaaagcagtcccagagaggggaaagatagaaaacacttgtgccgggcttccgtttacaaaacagtttcctacacagtgcgggcattaatcccactttgtggctgaggaaacggaggctcatagacattaagggtcttgttcaaggggctaagtcagtagtggtgaaggtgggtctcacccaggtgttctcattcctaagcctgtattcgctcttctccccaaacaactccaggaaaggaaaggattgaagacttagggaacaaatgaagtggcttctttgaagcacttgtacaaagaagggtggagaatccagatttttgaaacttttctgcatccagttattgtgtagattcacttagaagaaatggcatcagatggggaagggggtggtcaacattccattattgagaactgggggtcgggtgaggatggggaacacagaatgtaaagacagagcgcaggatgaaagatgggagagaactaagaggctacagctgaaaagggggcaagggagcctcagaaggaagggtttggacccttaaaacttcctttgcctagagacatgggtgtggggagaagggaggaggaaggacatttctatctcgtgacaaaagaaagtcacacaattgttttgttctctgctctgaggcgggtgggcgcctgtatttaccagagggacccaggtcgctgtggcaaccacacatctgggccccggaatccagatgtgctgtatccagaagccatagcagaacgatgaggcaaacatcaggctccccagtgctggcccccacagctgggaagaggatggagaactggtgtgggaagtaaagggagtgggggaaggaaggaggaggagaggaccaaagtgggggaaaagagaggacataatggaaaggggcaagaaatgtggacgagggagcagaatgggaaatagaaagggggcggcatgagaaagggaggagacaagcacagggtcagcagcagcagcagatgagaagaccaagaaaaacaaaggaaaaagacagtgaatttaaaaatatatatatatttttaaataaggccagcacggtggctcatgcctgtaatcctagcactttgggaggccaacatgggaggactgcttgaggccaggagttcaagaccagcctgggtaacatagcgagaccccacttctatttttaaattaaaaaaaaaatttaagacagtgaagcagtggatggggtggggaagatacaaaagaagaaaaaaacagtgatgaataatggttcaaaaagaggttgtgataactgctaatgaggtagagagcaaagaaaggcaggaaagaagtctagaaagaggaagggagggatgatgaggtcagggatgagagagaacaaaaggtgggatcctgaggaagaaatgaaggagatggtggcacaaggaaagcagaacagaaagacaaagtgggcatagggcaggaggggccaatgaggtgcaggagtgacagcgacctggcatgctgagtggccttgggggtgtggccagaggaatggagatccacatgggcctagaaggcagcagcccagagcctgcccggctttcaccctgcatcaggtacccactcaccgtccttctcaatccttcctgccaccacaatccctcagccaagagaggtctgatgtctcatccacaccaaagtgccagctgtcccttgccaatcagcagaggagcaggatgtcccaccccagggtgacccctgagatgccagcacttcaagtactttcccgaactgggggcaggaaggaggaagacaatgggacaacgaaacagtaatgaacccaaatgggataaaagtggaagagagaaggacaacagagatggggacagaaaggggcaagggatgaggaaaaggtgtatctattatggaccaggcactgaggacgtcgtctttcatcctgtcatcaaccctgattaggaggtaggaacatcccatcttacagataagcaaactaaggctcagaatgtttaaggacatctactaacgaaaggcagggtagggaatccagcttaggtgatgtgcttccaaaatccttgttctcactgcaccccctccagagatacggtggataaggctcaaggactctgggatagaaagcatagctgagaagctgggctgccctctggagggaggaaaggtctagttcctgggatccctggttccaggttgccatagttacttggtctgttttcaccccaaacacagtaatgggtgagggcagtgggaggggtgtgggggttgcctggctggacacatgaggttcttcctccctccttcaggcctgggcttatggcccaggcagcccctgtccagtcatctgggcattgagcccaggcccagctcacaccctccagctgacccaggacactcctgcagggtcaggcctgaggcactgctgaacaggagcagctggagggggattcttccaggttggcctcagactcaatccctcactttgtcctgctccccttcctcctaattagaatgcacagcctagccaggcatggtggctcacacctgtaatcccagcactttgggaggccgaagtgggcagcctggccaatatggtgaaaccctatctctattaaaaatacaaaaattagccgggtgtggtggcgtgcacctgtagtcccagctacttgagaggctgaggcagaagaatcacttgaacccaagaggcggaggttgcagtgagccaagatcgcgccactgcactccagcctgggtgagagagcaagactccgtctcaaaaaaaaaaaaaaaattaaaaacataagaatgtacagctttttctgcctgccccactcttgtctttgtctttcatctggactctcaagtctcagtcccctccagtttagggcttagaggatatcctgccacatcccccttcccttccaaatatcaccccttcttcaccgagacccccacttcctgggctctgagcctctggccccagctcttgttgtttgtttgagctgctcatcctggacagcaagaagagggggagaacctgctcgagagcaggagacccagaggctgctcaccctgaagggcgtggggccccatctttcctgttgactcacattccagggatgcgtatcctctagtctgtcacgccatgagacatcgttgctagacacagatataccccagagttgcaggggtgggggcaaggggatgacatgcggtctgtgatcccgcacccaccccacctcagagccagctatgtcttcagtgcttgattctttgatgctggctctggaaaagccactttcccccaaactccccatcacgagccaggaaggcagccaccattccttcaactccctccaagttgtttatttaataataataaaaaagaaatgcacacacataaacctgaactcccccccaccccaccctcccttactcccagtaactagctccaaaatgaaaaaacttcccttgtcccacctggggactaaattcccacctccactgccataacactagagaaacaaaataaaaaatatgcagcagctcaccacccaccccacaactgaacctcacacaatcccctcaaacaaagaagccaggactgggggttcacaggaatgagaggagccctatattctgaaaagggatgagaagagaggtgaacacccccacctcaaataagtgcttaacccccacacctgctctttcctttaccaattgccccaagcctggggatcagggaaatttgaaacagtcccacctggccacctggtaccccctccccccgttctaagtcagtgtgaatggcagaggtcagggatgattgaggtagaggggctggtgggaggcctggtgggcctggctggctgcagagactggcaaggggccacctgtggcattgcctggggttggggatggctgttttcggagcgaggggggcactgtggaggtcttgatgtgaatcaccctggtgtccatgacctcacactcgatctgcatcatctcctcatagtcccccggggccccacggcctgacagggtctctgtgagaaggggagagttaaggaagaggagatggggaggcaaacagggattgcagggaggaggggaggaggtcagaaaagtagaggtgagcagagagaaaaagaaagggcaatagtgaggaggcagatccatagcgggagttaaacaggatggcagggacagagtttggtgcaggggcaaggagagggtaggaaaagaaaagggcattgagtgtggggtcacacaggagaggacatcaagagaaaaaagtaagtgagagtctagcaggttcccggccccccgcctctgcccagtcatctacccaagcaccttcaccagggaaggaccctcacccttgtctccctcccaagtctcctgcatggtgctcttccctccacctacttcctgctgcttctcacctgtgggtccagcagctctctggatgccctgctcctctcccccttccccctcagctcccaggctggatctccctgttggaactgcccccatacccagcagggaaagagttaccattgggggccatggcaggcatcaccagggacatcttgggccgggaggtcttgttgtggctgatggctgggagcagcaggtggtcctggggaacagatgggccaggccagaagggtggaggcaaagatgccaacaagctccccagccctactctacatccccccactgaagacagactgctgggaacctggggtgacagagatggaagggcaggagaaactcacccttcggaaagagacaacataaaatgtgtcttcccgtcggtcaattgcatccaagaatgctggctgcgaacggtctgggtggcgatatagttgcagctggcccacagaatccctaggcaggtggggaaacaggatttgaggggaactaagcccaatgctcagtttctaccagggaagcgggtaggatgagagaaaaagacaggagacccccagtggaggagggaggtataatcccactggtgacagtaatgacaggcacaggacagctactgggggtacagctcttgaaagtggaatttcacttaataagtaagcaccccaccccacactcacctttctgggggtccagggggttggatggggactgccttaactggaggtgacttcttccgtggctgagacttctggaaggagaagtatctaaggacttggagagggtgaagggaaaagggaaagagacaaacagcccctggaagctgatgccacctcccactcaaccctccacttccttcaaacgatccctcaaacttccacagcgagatgcccactagaaatccccagacaaggcctttagcccttgtcttcaagtggccttccttgaaccagccacccgccctacctgtctctcctgggccctctgagggatcttcctccggcctctctggtggcgctggacccagccactcaactcgtcagcaagcctggggaaatggaggagctcaggacctccatgccaggccaagattcccaccctccttgcccacccacaggagtgaggagagggcagggagcactggcgctttagtacacaggccagccaggctgactgcagaaggccttgggaggccgggggagctggatgccccagcaatgaatcccacacctcagggactcagtgcggttgaagtgccggcaatcagaggagaggaagagctggtctaggtctcttagtagtagctccttggcgcccccagggaaggctgtcaggttgctggagtgaagcaggaaggagacaacacttggagactgcccagcactcccacaacaaagaaggcgatgacggcaagagaaagctttgggtccccctcactgaaagcggggagaagaccaactcatatcctcaaacgagagggggccctctctctctctcctcacctgaaactgggctggtctgtggggctgggctggggctccttagggccctgggaggacccctggagaggttcaactccctgaactggctcttgctctgagaaccccagcaagtgtctccggggttgaggctcccccttgttcatccgaggagagatgggagctgaaggaggctcactgatgctgtggataaagaaggactgagcacaatgaagaatttcagctgtatcaagtatctaggtaagaataaagactctgcagatggactgcttgagttgcaatctgttatacaagcctgagtctgcctctgtaagatgggaataaggatggtccctacatacaaaaaagacagtgcatcacctagagcctagaactcagtaagcacttaatagtcactatttctaccagcattatcaccatcatctactctccactggaaaaataatggagcaggaggccaggcgaggtggctcaagcctgtaatcctagcactttgggaggctgaggtgggcagactgcctgagctcaggagttcgagaccagcctgggcaacaacagtgaaaccctgtctctactaaaaaatacaaaaaattagccgggcatggtggcgtgcgcctgtagtcccagctacttgggaggttgaggcaggagaatcacttgaacccaggaagcagaggttgcagtgagccgagatcgtgccactgcactccagcctgggcaacagaacaaggctccatctccaagaaaaaaagacaaataatggagcaggaaggggctggccagacacatcatcggtgccaaggacaccagaaccatttgtatataagcagaaggaaatggcctgggccaaagcaggcagctaggaggctgtaacgtgggctccacctggaaggttctagtgaagcaaggaaggtctcacctgacaggtccaaagttgaaggcaatgaagagaaggaagaccatgatgcagaccaccttcctgtttccagaccctaacttgagctcgctgttctaaggtacaaagaaggagacaagaaaaaggggaatcattccaaggaggctgtattcctgttggtctcccagggacagactggtcttacttcagccagcagggcctccagccgccgccggagggcagcattctctcggcggagctgctggttgtcagccagtactgcttgcagccgagcctccagtccctgcagatactctttcttctttctccgggactggcaggctgactcccggttcttgatcattcgctgctgccgcttcagcagctttgcctaggcacccggaaggtcaaaaaagaatgacagatgagttggcagaaggagactatgctctcaaaccccaaggaatgatttacccaaagctcacatggccattcccctgccttcctgacccacctacatagccagagaggtttttcctctctactcaaacacgctagggaaggggcccttctttcaaacattccctgctactgctcctcagaggtgggaaaggttagagtgtgggaagaactttctccatgctggtggaaactctttccttcgtaactctttcttcctgtcagcccacatttgtagggttcaaagtttaaccttgttatactgcttatacagtttacctgattttcccctaggaggcagcctccctccccaactatggccatgaccgtagtcgtatagtacagtacgacttccttgcctttaatttatggagaccaaccccatttctccatctgcagtgacagcaaacctaaaggaccctaaaactacctggagttgatattcatatagaaacaggagtccattctgaccctcagaatgatctaatgggtccgtttcctcacttttttctcctaggtatcgactccctcctcatcccacagttctctctatggcaagacttccctcttcccttcccatcactcgccctacttctctcctccccaacacttacatccacttcaggcgggcaggagtttccaggcataggagcgggaacgatgctcttcctctcaggccgtggtagagagggagccggcccttcaggctggactcgaatagcaccctggatgaggacaactggggacactggggcaagtgagcagaggtcagagggctgtgcgctgggtggggtccttgtgtccacacccacacaagagcacccaaggattgggcagcctcaatggctgcaagctctctgacagggtcaatgcagcccgcctccttttctcctttttttcttttttgagatgcagtcttgctctgtcgaccaggctggagtgcagtggtgcgatctcggctcactgcaagctccgcctcccgggttcacgccattctcctgcctcagcctccccagcagctggaactacagacgcacgccaccacgcctggctaatttttttgtatttttagtagagacggggtttcactgtgttagtcaggatggtctcgatctcctgaccttgtgatccgcctgccttggcctgccaaagtgctgggattacaggcgtgagccactgtgcctggccttttttttttaattaattaattaatttttatttttattttttggtttttcttttttcttttttttttttttgagacaaagtctcgctttgtcgcccaggctggagtgcagtggcatgatctcggctcactgcaacctccgcctcctgggttcaagtgattctcctgcctcagcctcccgaggagctgggattacaggcgcctgccaccactccacgctaatttttgtatttttagtagagacaaggtttcaccacgttggccaggctggtcttaaacttctgacctcaggtgattcgcccgcctcagcctcccaaagtgctgggattaccggcgtgagccaccatgcccggcccttttctccttcttcagtacctgggggtggctggacgagggactgcagaaggactgtggtgctgggaggcacagctctggatggcattgggacagtggttagcactacaggtttgggctgcagtggcggcttccgggtgggcagggctttgcctgaaggaaggtgagagaaaagaacaagaaatgtcaggaccaaaggcctctcactagggattccaagtgtcaggagactccattacctgaggagccatcaagggatgggcccatgctgatctggacagctccaagtgagggggctgggacatcccacaggaggcatcctgaaggggacagggactctgtcttcacttccaggacctcctctcctataaaagcctatgtggggcattccagagatacattagtcaggaagagtgtcgaggagaaggagctgaagaagggaaagctctcatacctctaggtcaggaggaactcactggaaaacctggaggaaggaaggaaggtggtgctcacctggctggaggagtcggctgagagcagggaggcctcagagttgacggaagaacatggagagacaggttctatcttggtctggacatctgtgggaggcaggatgaggcaaaagctggatatcatgtaaacactgaagggttaagagggttaagatgggaggctgggcatggtggctcacgcctgtaatctcagcactttgggaggccaaggcgggcagatcacctgaggtcaggagttcaagaccagcctgaccaacatggagaaaccccgtctctactaaaaatacaaaattagtcgggcatggtggcgcatccctgtgtcccagatactcaggaggctgaggcaggagaatcgcttgaacctgggaggcaaaggttgcagtgagccaagatcgcgccattgcactccagcctgggcaagaagagcaaaactccatctcaaaaaaataaaaaagagggttaagatggggaaatgggtcctttctctttgaacctgaaaataaaactcttctggccctagattacaggccatccaggaggggcagtcacagagctgctcacctgctggctctccgccccgcttttcgcctagtgcttccctttctcctttagtggctcctctgatttttctcatccctgctccatgttcctcaaagctgtctttgcccttctgcgtttccctctttcttgttcacagaacttgtctattcacatagaataggcctgagcaggggaagtggcaggggggtctccagcattcacatggcccaaattcctatcttgctggatttccaccttatccctgcccaatgcatctccatgctgacaaccgccaagtgtgcatctccccctggctgctcacctgcaccagattctgacttccaagctgcctgctggtcccttccattctcatgcctcaccagtcacccaaatctaactggccataaatgaggcttcctgattgccccgtcacacaagttttcctcccaggcaccaaacagcaaagcctcagtcacctctgagcctccatggcctccaataaatctgcctttatgacttgttgatcactccatgaaagaaaatgctaggccccatgtcggtgaaataaaacccttctgagggccagattcagcccacaggtcaacagtccaccactacctctggtccataccgttcactttggtacttaattatatgatcactaagattgctttttaaaacttcaatttatatttttgaatagataatacagtcatgatacaaatccaaacgaacaaaggaaaattaagtcaaaaaaaaaatcttggcggggcacggtggctcacgcctgtaatcccagcactttgggaggccgaggcaggtggatcacgaggtcaggagatcgagaccatcctggctaacacggtgaaaccccgtctctactaaaaaaatagaaaaattagccaggcgtggtggcggacgcctgtagtcccagcaacttgggagactgagggaggagaatggcatgaacccagggggcggagcttgcagtgagccgagattgcgccactgcactccagcctgggtagagcgagactctgtctcaaaaaaaaaaaaaaaaaaaacttcccttcccggtcctccagtcactcagattccctacacagagataaccactatcagaactatttaaccatggctgggcatggtggctcacgcctgtaatcccagcactttgggaggccgacacccaacgcaggtggattgcttgaagccaggagtttgacaccagcctgaacaacatggcaaaaccctgtctctaccaaaaatacaaaaaaatagccggacatggtggcacgtgcctgtagtcctagctattaggggggctgaggcaggacaatagcttaaacccaggaaacggaggttgcagtgagtggagatcacgccaatgcactctagcctgggtgacagggcaaaactctgtctcaaaaaaaaaaaaaaaaaaaaaaaaagggaactatttaaccatgatgtattataaccctcacaaaactctccaaaagcaagaactatgtctcatgtccattgagggtaaagtacaggccctcaaaaaatacctaagtatggaggagaatctgactctaataacactatgcaatgcaaagccaccaacaatccttacaatccttttgctgctaatagcagtgggcgatctcggctcactgcaagctccgcctcccgggttcaccccattctcctgcctcagcctcccgagtagctgagactacaggtgcctgccaccatgcctggctaattttttgtatttttagtagagatggcgcttcactgtgttagcccgaatggtcttgatctcctgacctcgtgatctgcccgccttggcctcccaaagtgctgggattacaggtgtgaaccactgtgcctggcctgctaatggtatttcaatccttattttgtgtatcttttttataacatgtattaatctgctagatataatctgtttgtccctccaaatccactttccatccctccctgctgtgctccctgagatccagggagaatctgaatggactgcatcagcgggctccctggttggagttcagccagtgagagatggtgccaggagatccagaaggtactttgaaatcaacaatcaacatgtcaactgggcatggtggcttacgcctgtaatcccagcactttgggagccaaagtgggtggatcacctgaggtcgggaattcaagaccagcctaacatgaaagaagccctgtctctactaaaaatacaaaattagccaggcgtggtggagcatgcctgtaatcccagctactcaggaggctgaggcaggagaatcgcttgaacccaggaggcagagattacagtgagccaagatcacaccactattgcactccagcctgggcaacaagagtgaagctccataacaacaacaacaacagaatcaacatgtccaacgctgaattcatcatcttccctgaccagaaagcccctgcttttgcagtctccatccagtgaacagtaacatcacccacccacagccatcctagccacaaacctctttgactcctacctctctccaatgtccaggaggtcacaactcatctattccacttcattctttctcaagtctgctttcttcatgacatccgaacatcttacttgatcaactgcataagcttcttccttggttctcttgcctctggccctgcccctctgcaacccattctctactttgccactagaatcatcttcctaatcatattacttccctgcttaattctccaaaggcccccacctatccacaggataaaagctaagagccccttagcaggggccccacctggccctgtagcccctgcagttccacatcactccccaaatccttcttacatccactctgaagaaatgcagggtcctcagacacaagtcaacccccacactgtcctcctggctaatttctacgtgtcctttaaaactctcaggaaacccttcttccaggggcacatcccagattcagcgccaatgtggatgaaatgtcccctcttatgagctttcatggtaccctctagtgattttttttttttttccagacggagtcttgctcttttgcccaggatggagtgcagtggcgtgatctcggctcactgcaagctccgcctcccgggttcatgccattctcctgcctcagcctcccaagtagctgggactacaggctaattttttgtatttttagtagacacggggtttcaccatcttagccaggatggtctcaatctcctgacctcgtgatccgcccacctcggcctcccaaagtgctgggattacaagcatgagccaccacacccagccccacctctagtgatttctatcctagaatgaccacacctgtattgactggtacttgtctttctcccattaccaaatcacagggtttgaaagtcagcatggtggtcaggtcttgttcatctttgcattcccagcatgctgctcagtatctggcatggagtaggtgcttaataaatatttcttttttataattattatacctcagatatgatcacatcaataaacatttactaaatacacagctacgagtaaataaacttgggaacactttaaaaatagaacaaataatgttaattgtagaatctagtttagtatatggtgttctagcctttctgtatgtttaaaaatgtttatgggctgggcgcgatggctcacgcctgtaatctcagcactttgggaggcggaggtaggcgactcatgaggtcaggagttcaagaccagcctggccaacatggtgaaaccccatctctactaaaaatacaaaaaattagctgggcgtggtggtgggtgcctgtaatcccagctacttgggaggctgagacaggagaatcacttgaacctgggaggtggaggttgcagtgagctgagaccacaccactgcacttcagcccgagcgacagtgtgagactctgtctcaacaacaacaaaaatgtttataataaaatgttgggtggaggggaatcacacagatacatatgccctaaactgctcacaagtttttaaaaagtaagttgaatggcatgacagaatactaggaacaagaaaaagagagaaaaataatatccatctcctcagcactgcccttgctgtggttccctgaaatgtttcctctccttcctgccttccctcctggttttctgccatttcccctccccacctttttctccctgtcctgctgcctgcacttcccctccatctacacacatacacacacacacataacacattctcccgtagtagagccaaggattgggggcaggctgttttattacctgaggaatcatcagaggtggggataacattgatctggacggtttcaaatgaggatgttgggtcatctcccaggagacacagtgggggtgccaaggactctgtcttcacatggagcacctcccctaccccaagagcctgggtgagagttggtgtggggcagggggcagaaagaagggcaaaaaacaagggagatgttgacagtaagagcgagaacaaaagctttagaagtttagggcttacaagccatcaattatttgacattctggtctgaatggtactgaccatctttctaacctgttcattctttctactttatttctgggagaattgatgaagtctcatgacttcaaatatggcctcagagtggacaacttgggcaagaacagttccagaattctcagcagtcaataactctcttcttcccagccccacataactctttatattaaaaagacccaagatcaggcgtggtggcttatacctgtaatccaagcactttgggatgccaaggtgggaggatcacttgagcccaggagtttaagtccactctgggcaacataggaagaccccatttttacaaacaataaaaaaaattagccagacatggtggcatgtgtctgtggtcccaactactcaggaggctgaggcaggaggatcacctgagctcaggaggtcaaggctacagtgagctgtgaccctgtcactacactgtagtttgggtgacagagggaggccctatctcaaaaaaaagcaaaaaacaaaaaacaaacaaacaaaaaaatcttcactgctagataaccaaaggggatgtggaaaatgaagatattaaggaaacggcaaaggtagtggagaaggccccccacacctcacacacctcatgactcatagcacacaaatcatttaaatcatttctttgtcacccacgggtgaagggaatgaagcagagtccccgtcacagagagtaagagggatatggctctctcacctcgctggatggctctgtggagagacgcgatgactcggagctgagggaggaggaagagcagggggaagatggctcagacttcacctgaagatctggaggaaagggagttagaaattatcaggaagcagagcttaagaagagtccaaaaagtacccaaggacatgtcggtggggattcctgtaccgcagcaagggagaagaaacaaaaataggggattgaaggagagaggataggcacttatgtagaagcgtgaggatataggaagctacgtagtttctgggaaacagtgggaagatgagggtttctggaaatctgagggaacgacaaagactaccttacctgggaagatcggcaggagttcccatgggggctcagaggggctgacatccatccccacgtccagggagctgccgtcaaactaaataagggaggatacaagagggcaggagtgtgagaaaggatgagaaagtaggggtgactccagatgagttatggcctgtgaatgggtccaggttctgggctcactttccacccaccaagggttagagaaaggctggggacacaataccgggacatcctgctccgggcaacggaagagctgcgtctgctcctcggccacttcatctaggccagaatacaaggtgctgtctgcaagaaatgctgagcgtcggggggtcgttcggtggccccagcctacagatcgcacacaagcccccgccccatccctcattggctccgctcggccagacccaccgcccgcccacttgaaaagtgatacaaccagggcgcttcagcccctccttccccgaccccggaacaactcgacgttccagcagggagcagagttcttccctgacttttgtatcccccttaatgcacaacgagccccctgctccgctctccttcagatggcggattccgtatttgcccagacttcctctttaggcccccgcttctttcccgcgtgcctcagggacagtttgccacagccctctcccctccccggtgcctcactctgcagaccccagtcctccgggctaagcaggttgtcggtgaagaaacgcgtcgggtcagcaatctcgctgagcagcatcagctccgccatctttcccccccaccccccaaccaggagacggttcccaaggcccgcctctccccatcaccaactaatcagttgactctttcaaaaaagggggcgtcccggaagctctaccgaccagtaagagacctgggtgctgagcacgtgaatcaacagatgcggatgactgtgtaggcgggcccaatgggagcacagcagcaggaagtaacttccagacagtgccataccgccaagcgcatgcgccaaacaggctccagtgataaagcgcctgggagatgtagtacccagtattaaggtccaccatctcccccagccactactaagtttagtttagacagcttctatgtgtcctcggagatagataagcccctcaaaaggggcgcactgtgaccactgctacctcccctaggaagccaaaagctgagaatgggatatgggctgaaaccttccctctggccccccacccccaaatctcacagcacagaccacaattcacaagttcctgtctcttttaaggtttaacttttaatcagccaaacatcttgcgcagaccctgagccagccctgcatcctggttcttcccctgaatgaccaccttccccagttcctcctgggctgcccggtttttgggatctatcgccagcaccttcttgaggtcagcagttgctttttccaggttcccaagggcagcctgggcaaccccccttcggtataaggcctttaaatggccaggctcccgctccaacacccggtcacagctctgggctgccaactgaggctgccctagcaacaactgacaggcagccagattggcatgaaggacagttcgttctggagggccaggtgggggtaaagtcaggagcagccgaagagcccgtccatagcatcgggcagctccttcagggttcccagctcgaaatagttctgtgccccttgcacgttcttccctggccagggcttccttctcgctagtctccagctcccaggagtctcggccttgagtgaaggatgccagtgtgagcctgacaggaggtccagagtgcccaggcagctgaagctctgcttcctcaccttgacacatggactccaagcatttctctatgagctccccccaagtttcctccctccatggccctacgcccatagttagctctgtccagccctctggcggccctgatccgaaaggaaaccccaaagccagtacccggcagcaggagcctagtttgggtttgtccaagccatggccacggattacgatcttcttgacaaagctcccatcggggcagtaccagagatcagaagcttgaagggcctctggcatctgactggttgatccatgagacttatgagagtctccttcaagttcagcaaccagtttttcagctccttgagtatgctctagaatttggctggctggatctgggcttacttccagctcaagcgtttcggtaggagggtctcggggctgctgcctaatctgaataactgaatcaaggttctcccgaaggttcttttcccactcttgttgcggctgagaggtgtccttttctccaattgtattgactggtggcgtctccatatggatgcttagtcccttccacggtgagtgaacagttttggtcagaaagggatgaaccaggttcaggtcagcacctgaaaagaaaaccaaacaatgctaatagcagggttcttatttagactcctttctcgtcctttcccattcttctgagacccaggcccctagtcctgaaagtccccagttttgctttcctccaaaaatctgctccagcttccccgttccacccacatataatttagaactataaattccacaattccctgcggttaaggtagccgcgccaactacggacacccggtcgggtcaataagtacctgcgcggccaaagtgcctggcatggtgacaggaggagccgggccattcgaatcacctctccttccaaagctaaatggctactgaatgctgccctcggagccttgccccacgcggagagggcagccggagaggggcgcggtgcgggaggcgggggtagggggcggaacaactgggaaagatactgacaactaaccctggagcccgcgagactccgaatctagtcaaattcctggcagccaatcgggagaagggaggaatctggttagcccgcctattgaacgtgacatcatttcctccgcaaccatgaagctccaggccttagcaactgaactaggccagagcaaccgaactaggcagaatcgaacagaatttggcgcggtcgggctggccaggctgctcaagagtcaaagtgggccaacatggtgagaccctgtctctactaaaaatacaaaaattagtaggtcatggtggcgcgcgcctgtaatcccaactactcggaaggctgaaacaggagaatcgcttgaacccgggagacagacgttgcagtgagccgagatcacaccattgcactccagcctgggcgacagagcgagactagagactccgtctcaaacaaaaaaaaaaaaaaaaaaaaaagaaaaggtgggccgggcgcggtggctcacgcctgtaatcccagcactttgggaggttgaggtcaggagttcaagaccagcctggccaacatggtgaaaccccgtctctactaaaaatgcaaaaatagctcggcgtgatggcgggcgcctatatcccagctacccaggaggctgaggcaggagaatggcttacctgggaagcggaggttgcagtgagccgagatcgcgccattgcactccagctttggcaactgagactctgggaggctgaggtgggcggatcacgaggtcaggtgatcgagaccatcctggcaacatggtgaaatctcgtctctactaaaaatacaaaaagttagctgggcatggtggcgtgtgcctgtaatcccagctacttgggaggctgaggtgggagaatcgcttgaaccagggagtcggaggttgcagtgagccgagatggtgccactgcaatccagcctggcgacagagcaagattcccgcctcaaaaataaataaataaataaataaaaagccgggcatcgcgcacgcctgtaatcccagcaatttgggaggccgaggcggcgggggggggcggggcgggggggagggggcggggcggcggggggatcacttgaggtcaggggttcgagaccagcctggacaacatggtgaaaccccgtctctactaaaaatacaaaaaattagctgggcgtggtggcgggcacctatagtcccagctacccgggaggctgaggcaggagaatggcatgaacccggaaggcggagcttgcggtgagccaagatcgtgccactgcgctccagcctgggcgacagcgcaagactccgtctcaaacaaacaaacaaacaaacaaaaagtcaaagtgtagagaagtcctggaatggagactgggggcggatgacaatagagtggagaatggcagaggtcgtggtaaatgatagtggcagcagccttttatctggagacttcaggccctcctatgctaactatctttatgttcagagctcattcagtacagggtgttctccaggataaaacctcgggactctctctccaaccggccctgtcccttgggtgactacctgaggcttctctttacctttcctttcacatccatcattgcctttcaagtcctccttcatcaagaaatcttagtgcttttcaaacataagtgtgcatacatatcacctagggaacttgttaagttgcagattatgatttaggaagtctgttgtggggcctgtgattctgcatttcaataagctggttaatgcagatgctgctggttcataaaccgtatgtttttctttttttttttttttttttagagagatggggtctgctgtgtttaccaggctggtctcaaactcctggcctcaagccatcatcccatctcagcctcccaaagtgctgggattataggtgtgagccaccacacccagcaatgaaccaatgggatgagattctagaacagtctcatcccattgtcttctcccctggctctgtgcccctttagtttatcctacattttacatgtataactggtgtgacctgctccactggatgttgcaggttctcctcctaatagaagatgtagagacctattgtgattcagtcttgcttgtccagctacctacacagcctgggctaccacagttctccaggaaagaaggatccctctcttgagtacctcactttggctccctcttaagtttgctctcaccattgtgcctcagactataaaaaccatgccaggacagccaggaagggagacggtttcatcattagccaaagacttgtgtcaaaacaattctctccctggttttgtttgtttgtttttgtttttttgttttttgttttttttgagacggagtatcactctgtcacgcaggctggagtgcactggcgagatctcggctcattacaacctctgcctcccaggttcaagcgattatcctgcctcagcctcccaagtagcggggatgacaggcacctgccaccatgcctggctaatttttgtatttttagtgaagatggggtttcaccatgtcagccaggctggtctcaaactcccgaccagaagtgatctgcccacctcggcttcccaaagtgttgggattacaggcgtgagccacggcgccaaggcaggcggatcactttaggtcaggagtttgagaccagcctggccaacatggtgaaaccccgtctctactaaaaatacaaaaattagctggtgtggcgcatgcctgtagtcccagctactcaggagactgaggcaggagaatcgcttgaacctgggaggcggaggttgcagtgagctgagatcgcgccactgcacggaggccgaggcgagcggatcacaaggtcaatatggtgaaactccgtctctattaaaaattcaaaaattagcctggcgtggtggcacacgcctatagtcccagctacttgggaggctgagacagaagaatcgcttgaacccaggaggcggaggttgcagtgagccaagatcacaccattgcactccagcctgggcgacacagcaagactctgtctcaaaaaataaataaataaataaacacaaatacaaatataggcattgaaacccctaaaaaaaacctaatccaaatcatcatgtatgaaaatatttctctttttaaaaatatggcccatcaagaggtaagcacaaacttaaagttttagaagagttccccagagaagatagccatggacctgtagattccccctagtcttaacttgagaaacacaggactaggaagggaccaacaacctgtgaagattcagaaataggaaagagtggccaggcgcagtggctcatgcctgtcatcccagcactttgggaggccaaggtgggtggatcactcgaggtcaggagtttgagaccagtcgggccaacatggtgaaaccccgtctttactaaaaatacaaaaattaggctggtgtggaggtgtgtgcctgtagtctcagctacttaggaggctgaggcaggagaatcgcttgaacccgggaggcagaggttgcagtgagccgagatcacaccactgcacttcagcctggcgacaaagtcgccttatccaatttcctttcctttcctgaggtagaaaggaatttgagaaattctgtctcaaaataataatttgtaaaaaaagaaataagaaagagtataggctctcccccaaagtgtagatactacatgcttgttgactgactcacactatctccctcaagtctaattgtgccagagctcagctctttggaggcagtcatcaaggaatcaagacgaaagagagccacaaaccaggaagattatatccttaagcctggctagagaacaagacatttgagaaagatacataaagaggatgacaagtgaaatttgcttatctgttgggatagatgcttggactggaaagtggggaaacagcaatgtctctctcctctccctttcccctaaagatttgagaatgaaatggaagatgagcaggcatgagaggaagagatgaaaaggaatcttcttccccaagggactggatccagtctcttcttgtcactacaaattgtcctctgctccctctcttcctttggtgttgcagggaccaacatcaccaatacctccagaaatcgtgtgaatgcaaatgggacatacttaccccgtcttgctacacagaaacctctcgaaaagtgagactttgggttaagaaggtcaaagagggccaggtgcagtggctcacgcctgtaatcccagcactttgggaggccaaggcgggcagatcacatgaggtcaggagttcgagaccagcctggtcaacattgtaaaaccccatctctactaataaaatataaaaattagccaggtgtggtagcgggcgcctgtaatcccagctacttgggaggctgaggcaggagaatcgcttgaacctgggaggcagaggttgcagtgagccaggatcacaccattgcactccaacctgggcaatagtgtgaaactccgtctcaaaaaaaaaaaaaaaggtcaaagagacatctaggagaatgcaagaacttgggaggagggcaataattctgctatgattgcagaatgttaactccattttggaacaattctccactcctttaagtgaagaaaattggactgagggaaaccatatttgacaagtttctggggatttacctgcaaatatatttacatcttacctggagtcacttccctccttccttttttctgggtcctccccttctaagatggctcagagaaactggccatactctgttattctccttgttctatcccagaagggcattgtttgccttcattcaagacctaacctgaagcctgggcaacatagagaccctgcctctacaaaataaaaattagctaggcagggtggtgcacctgtagtcctagctattcaggaggctaaggcggaaggattacttgagcccaggagttgagactgcagtgagctaggatcacaccactgtaccccagcctgggcaacagagtgagaccctgtcttttaaaaaaaaaaaaaaaaaaaaaaaaaagagttaacctgaggcagaacccaaggagaggttcaggagctggcttgaggtagtttgccagctagtggttgtttcatcttgttcctgcacacagagcatatgatgcttgccctctaaatggatgaagtagaatttttttcttattcattcagtagcccttattgaatacccagaatttgccagtgaaatatggagacaaatacggagaatccccaccagtaatctaatgagagtgaaaagtcagattagccaatgctccagatgcaaaggaaaaagtgataagtggcaggggagttattttcaactggggttgatctgaaaatacctcatggatggcttcagagagttgagacttgaaagagggccgcaaatttgatatgcagaaatggaagagactgccgggcacggtggctcatgcctgtaatcccagcactttgggaggctgaggcgggtggatcacaaggtcaagagatcgagactatcctggctaacatggtgaaaccccgtctctactaaaaatacaaaaattatctgggcgtggtcgcatgtgcctgtagtcccagctacttgggaggttgaggcaggagaatcgcttgaacccagggggcggaggttgcagtgagccaagatggcgccactacactccagcatgacgccagcgcaagactccatctcaaaaaacaaaacaaaacaaaacaaaacagaaaaaaagaaaaagaaaaagaaatggaagagatttattgcaggtggaagaagcagcacaaggtaggagaagtaaggaaagccacttaacacccaggattattcctctccagtctgtgagtctcagttttcccaggctattccaatactcctttgtgctgccctgtcaccaggcattgagctggttggaagtttttacactctcacattcccctgcgttctatactcaccacatggaaccatatgctgcacttattctcttccatttattatctgcatgagagacaaaaattctagctttccaaaagctaaataaatttccccttctgtttagctttggtggtttctgtggcttttagttttgctgggatttgtgtcaaaatcgttcctccctcctttttggtcccaaagcattttgctgtgcttcccttatagtcagggttttcaagcaggagggaggcagcctttttggcagtgaagtgtttaatgataacagcttcaccttactaaacgctggccatgcattatgaccgtaatactcagcattgttctaaatgtcttgtatatattagctatttttctctcacacaactctatgaactacttattcattcagtgattcaaagaattttgtttgtttggttggttggtttttgttcttgttgctgttttgagatgacgtctcgctctgtcacccaggctggagtgcagtagcgtgatctcggctcactgcaacctacgcctcctgggttcaagtgattctcctgcctcagcctcctgagtagctgggactacaggtgtgcacccccacgcccggctaacttttgtattttttttagtagggacagggtttcaccatgttggtcaggctggtctcggatttgtgacctcacgatccgcccacctcagcctcccaaagtgctgggattacaggcgtgagccactgcgcccagccaagaaatctttactgagggcctcctttgtaccaagcactgtgctacatgctgggaataaggcagtggaaaaagccttggatctctggtaacttacattgaattgaagatgacagacgataaaaaaatcaataaaatttaatacaatgtcaggcactaacaagtgctatgaacaccatgaagcagggtgaggggtaagggaatgggatagaaagtgctcccaggtatgcatggtgctatatttattgatgatgatgattattattatttatagagtcttgctctgttgcccaagctggagtgcagtagtgtggtcatggctcaccgcagccttgacctcctgggcttaagtgatcctcccaccgcagcctcatgagtagctgggactgcaggttcatgccaccatgtctggctaatttttttttttttttttagagacgaggtttcactatgttgcctgggctggtctcaatctccaggcctcaagcaatcctcctgcctctgcctcccaaagtgctgagattataagcaagagccactgtgcctggccatggtactatatttaatcaagtgatgagggaaagcctccttgtggaggtgatgtttgtgcagatataaatgacataaaggagcagtcatgcaagtatctggagggagagtgtccaggaaaagaaaaagagagtgcaaaggccctgaggtagaaaggaattggatttttatgttaaattcagaaaggaggtcagagtgagtggagcagagtgagcaagagaaagagtggtaagggatgaagacagagaggtggggagaaacaaggccaggtaggcttcataggccatgggaaggactttttattttgtcccacatgtgatcaggaggcatcagagggttttgagcaggtaaatgatatcatctggtaattttaaagatcactctggtttcttcatagagggtaggccacatcagtaaaaaatagaagcagaaaatccaattaagggacaaaggaagggacaatggaatcatgggagcttggattagggtagaggagagggccaagaatagagtccagaggctctctaatatttaaaggtctggaaaaggaataggagctgtcagtgaagactgagaaggagcagtaaataaggaactagggaatgctttctttcttttttgtttttgagacagcctgttgcctaggctggagtgcagtggggttaccatggctcactgcatcctcgacttcccaggttcaagtgatcctcctacctcatcctcccaaatagctgggaccacaggtgtgtgccattatgcccagataattttttaattttttgtagagatggggactccttatgttgtccaggctggtctcaaactcctgaactcaagtgatccatctgcctcagcctcccaaagtgctgggattacagatatgaaccactgcacctggcaggataatttttttcttctttcttttcttttttttcccccacaattttaaacccaagcagtacacctggttggttgttacatgattacattgcatcctggtggggattgggcttctagtggtgtacctgttacccaaatagtgaacattgtacccaataggtaaatttttttttttttttgagatggagcctcactctgttgcccaggctggagtgcagtggcgctatctctgctcactgcaacctcctcctcgccccaggttcaagtgattctcctgcctcagcctcctgagtagctgcaattacaggctcacgccaccatgtcaggctaattttcatgtttttagtagagacggggttttgccgtgttggccaggctggtctcgaactcctgacctcaggtgatctgcccgcctctgtctcccaaagtgctgggattacaggcgtgagccactgtgcccgactttttttttttttttttttttcccgtgatggggtctcactctgtaacccaggctggagtgcagtggtgtgactccagctcactgcaacctctgcctccctggttcaagtgatcctcccacttcagattcccaagtagctgggaccacaggcacataccactatgcccagctaattttttgtgtttttggtagagactaggcttgtctcgaactgctgagctcgagtgatccacctgcctcggcctcccaaagtgctgggattacaggcatgagctgtcacacccagccaaatatttggttttctatgtttgagttagttcacttaggataatggcctccagcttcatccacgttgttgcaaaggacatgatttcattttttttttttttttttttttgagatggagtttttctcttgtcgctcaggctggaatgcaatggcatgatcttggctcactgcaacctccgcctcccaggttcaagcgattctcctgcctcagcctcctgagtagctgggattacaggcacgtgctaccatgcctggctaattttgatatttttagtagagacggggtttcaccacattggccaggctggtctcaaactcctgacctcaggtgatctgcccacctcggcctcccaaagtggtgggataacaggcgtgagccaccgcgaccggccaatttcattctttactatggctgtgaaataattatttattgtgtcctccagttgcaaggagtttaacagcatgcctggccgctgctcactagacgctaggagcacctcctcagttgtgataactgaaacaactctagacattgccaaatgttcctgggggtgggatgggaggatcacccactcttgaaaaccactggtcaagatgtcccacaggagatacttggcaagacaatgcacaggtcagacccccatgacaaagaactatctgacccaaaatgtcaataatccctgaaactgagaaaccctagtttagactctagttgagaacttattcctggaactaagccaggtttggctgtgttttctcgtggcccaataacgagaagcagacaaactaggaaagaagggaatttgttgctgtcaccggatacagggaaagggtcggagataattccaccagaccaactcaaagtgttacaattttctttttttcttttttttgagacggagtctcgctctgtcgccaggctagagtgtagtggtgcgatcttggctcaccacaacctccgactcctgggtttaaatgattctcctgcctcaggctcccgagtagctgggactacagacgcgtgccaccacgcccagctaatttttgtatttttagtagagacagggtttcaccatgttggccaggatggtctcgatctcttgaccttgtgatccacccacctcggcctcccaaagtgctagaattacaggtgtgagccaccacacccggccagtgttactattttcttagtgtttatacaggtttaggttatatgcctacatgcagtatggcattcaccaaagtctatcagtaactaattttgtttcaactagagggtcagaggcaaaaaaattcttgctaagtctgattaagctgtgagggccccagtaccttcaaggcctgtttactgtggtaccagagtgattatttctatcttatctcctttacagcttggtgcggagagctgccttagattgtccagtgaatctattcaaacagctgcctctgttaccttgacttgtctcagatatcgtcgacccgagacgagtcctggcactaggaatgtaaggctgtctctgttattttgacttgctccagcaagggagaagcccatgcaaggctcttactcaccatgtgtttcatttctagctttgatgtctgtacaccaattcccctaggtttaactatttgctcaatgttaaggcaatgctgtggaaatctgtctgtgtaactggggtgctatgcaggcctgtctgtgtgactgtcagggagaattggcctgccacaaactgacccttgaccattgggtttagaaacttggaggtcatttgtgactctgacatgtggtttaagtaaagtggtggggatgagagcctgattgagagaaattcaagagtgaatgagaggtgagaaagtagaggcagtgagaagttttgttaagtggagagagaagtggaacactgagggagtgagctgggtcagggaagagtttttaaatttaaaaataaatgcattattttatacatataaaattataatttatatgcataaatatatatgtattacaaagaataattttgtgaacatcaggcagcttatgaagtaaaatcttcccatcagggcaaggtggctcacacctgtaatcccagcactttgggaggctgaggtgggcggatcacctgaggtcaggagttggagaccagcctggctaacatggtgaaatcctgtctctactaaaacattagccaggtgtggtggtgcgtgcctataatcccagctacttgggaggctgaggcaggagaatcgcttgaacccgggaggcggaggttgcagtgagctgagatcgtgccattgcactccagcctgggtgacagagggagactccatctcaaaaaaaaaaaaaaaaaaaaaagaaagcaaaaacaagaggtaaaatcttccccagtatagttaaggctccctgaatttccctttccagattgcttttctgccaaagggtaagcaccattctctgaatgttgtgcttttactacctaggtgagtagcgaaacagtttttttctttcttttcagagatgaagtataattttatagcatgtttgcataatgatgggagtgttgcagtacagaggggtaaactgattaagtgagagagagagagataggggataatttcaggaataacatctctgagcaggtgagagggaacaggatcccggggtacagatgaggtggcaggtgggtgcatgtcagcttctctgcggtagagttgcaggtagactggtgaatttggggtgggaacatgaggaagttcccttctgaaagtttctgttttctcactgaaataggaagaaaagtcatcatcttgtgaagttgtggtctcagatttggggaatgtgaactgagtagggaaaggcgagctggcatgccacactgagggcccgcaggaagcaagaccagtcagtatgactgtgtgtttctccccagctgttgaatgcaggtgtggagcaggcagagtgggatttgaccagggataaaatgtgccagaggaaggggggccaggagtacagggtgagggctgagaggcgattaccgtgttgaaccttggaatctaaactgggtaatgaggaaagtgaagaattgagatcaaacaatgaaaagtaagttagtggatgggaggcccagatggggttgaagaatttttgggataggggtactggggagcaacatgaaaagactgaggatgagattttagaagggcagtaggtattggtggcaaccaagttgaaggtatgacatagggcgagagggaagcagggagaaataaatcactgcaagagaagggcagggtgctagagaatctgcatgaacattgaaaacaaaaataataaaacggggccaggcactgtagctcatgcctataatcccggcactttgggaggctgaggcaggcagattgtgtgaattcaggagttcgagactgtcctgggcaacacagtgtgacctcatctctattaaatatcaaaggccagaggccaggcgcagtggtttatgcctgtaatcccagcactttggaaggccgaggcgggtggatcacgaggtcaagagtttgagaccagcctgaccaatatggtgaaaccccatttctactaaaaatacaaaaaattagccgggcatggtggcacacgccggtaatccgagctactcaggaggctgaggcaggagaatcgcttgaacctgggaggcagaggttgcagtgagctgagatggcaccattgcactccagcttgggcaacaagagcaaaattccgtccaaaaaaaacaaaaacaaacgaacaaaaaaacaggccaggggcggtgcctcaagcctgtaatcctagcactttgggagggtgaggagggcggatcaccaggtcaggagattgagaccatcctggctaacacggtgaaaccccgtctctactaaaaatacaaaaacaaaattaactgggcatggtggcgggtgcctgtagtcccagctacttgggaggctgaggtgggaggcgggagaatggcatgaacccgggaggcagagcttgcagtgagccgagatcgcaccactgcactccaggctaggcgacagggtgagactctgtctcaaaaaaaaaaaaaaaaaaacccaaaatttatccgggcgtggtggcaggcgcctgtaatcctagctactcagaggctgaggcagagaattgcttgaatccaggaggcaaggttgcagtgagctgagattgtgccactgcactccagtctgggcgacagagccagactccatctcaaaaaaaaaaaataaaataaaaataaaaaaaattagctgggaggatcacttgagaccgggagatcgaagctcagtgagctatgatcctgctgctgcactccagcctgggtgacagagcgagaccctgcctcagaaaaaaaagaaaaaagaaaaagaggctgggctcggtggctcacgtgtgtaatcccagcactttgggaggccgaggtaggcagataacctaagatcaggagttcaagaccagcctggccaacatggtgaaaccctgtctctagtaaaaatacaaaaattagctgggcgtggtggcagatgcctgtaatcacacctactaaggctgaggcaggagaatctattgaactcaggaggcggaggttgcagtgagacgagattgcgccactgcactccagcctgggcgagaagagcaaaactccatctcaaaaataaataaataaataataaaaagaagaaaatgaaatgagcggtggaagtagagtgatcaggtgctgaatcttccattgtagagggggaatgatgacccagaatctaatcatggttttcccccatctgtatgagagcacccatacagatgttatgggagggcagagcctctcctagaggatggagtctctgtcagtagaggtgccacagccaagggtatcacctgcagagggaggtgagtcagataggaagaggatcacattgtaactttttttttttttgagacggagtctcgccctgttgcccaggctggagtgcagtggcacaatctcggctcactgcaagctctgcctccgggattcacaccattctcttgcctcagcctcccaagtggctgggactacaggtgcctgccaccacacccagctaattttttgtatttttagtggaaatggggtttcaccgtgttagccaggatggtcctgatctcctgacctcgtgatccgcccatctcggcctcccaaagtgctaggattacaggagtgagccaccgcgcccggccacacattgtaacattttatttcctcatgagggaggagtctgggtgaggttaagagatctgagattaagaaacaaacattcctaaggaaaagcaaaagaaagctaagtcattttttattcatctctccctttgcctgattcctttcaattcaattgagttcaaagattggtagaggaggttttatctgatgaggatctgaaaaacagagataagccagatttgactcttgccttcaagtagctcacaaggtaaactgtgtatgtcaagatatcaggtgggaagagatgagaaaatatgcagataacatgaatcttagatctagatacttttctcctaaagaaaattgcccgggttgaagtcattttttggcctttccattctccctgggtggtccttaaagtgtctgtaaacctgtgattcccaaccttggctgccctttggaatcacctggttatgtcttaaatactgatgccagagttccacccccagagattcttttttgtttgttttgagatagggtctcactctgttgcccaggctggagcaccgtgttctgatcactgaagcctctgcccctcaggcccaagcaatcctcccgtctcaccctcccaagtagctaagactacaggtgagccatggggctcggctaaattttttttttctttttctttttgagactgagtgcctctctgccacccaggctggagtgcagtggtgcaatctgggctcactgcaacctccgcctcctaggttcaagcgattcttctgcctcagcctcctgagtagctgggattacaggcatgtgccaccatacccggctgatttttgcagttttagtggagacggggtttcaccacgttggccaggctggtcttgaacgcctgacctcaggtgatccacccacctcggcctcccaaagtgctgagattatatgtgtgagccaccgcgctcggcctaggctaattttttttttttttttttttttgagacggagtctcgctctgttgcccaggctggagtgcatggcacgatctcggctcactgcaagctccacctcccgggttcatgccgttctcctgcctcagcctcctgagtagctgggactacaggcacctaccaccacacccagctaatttttttgtatttttagtagagacgcggtttcaccatgttagccaggatggtctcgatctggcctaggctagtttttaaactttcttgtagagatggggtctcaccatattgcccaggctagtctcgaactcctgggcttaaacgatcctcctgcctcgacttcccagagtgctgagattacaggtgtgagccactggcactgagcccagagattctgatttaattgttttaggatgcgacatgggctttcagatttttcagtgctccccagtggattctaatgtgtaacctggggtaagaaccgttgctccaaggaatgcctgaagctctgtttggaaacccactgctttaatctaacccagaggaaagagagacacctttttgctacagtgagggatgaattgatccggactttgaaagatattgtaaataaaatttgaccaagtagagaggcagatgtcaagagggggagaacatcatgagcaagagcctagatgtggtctaaagcctctgaaatttgtgacaagctgcaaacaatttggtttataataggcagagatttgggaaggaggtctaagatttgggaacagctgggcaaatacctggaggtgggaatgatgagtaattcagtatggttagaaattagaatgaacagagaagctggatgattttaaattatggaaggtgttaaaggccagattaaaattttgtaaataattgagtaggcaatagggaaccttgaagggcttttgagcagtggagttatgaaagtgtgtttagggaggctgatctgacaatagtgtggagggagacttgaggtagggagaagtaggaagtagggagacctgttgggaaagctgatgcaataatcctaatgaggtaatttttccagcaagggctggggaaaaattacagattcaaaagacattgtggtggcagaactgactaggcttgagagcacaccaaaaataaggcaggagggagagggaggaggcggcaaatttctagataaggaagagtgattgggaaaatggtctattaacagagacagggaagcaggttttctgtggcatttcatcagtttgttttggaatgtgttgattttagaggaccagcaagcatcttccatgtggctatgatcttcaggcactggaaaaaacgtctgcatgtaaaatacaggttggaaaagcatttgattagctgagttgagtgaatgagcttttcaaaggaaagtctcagagaaggaaaaaaaatcagagatggacacttaggggaagggaggagaaaaagcaaggagggaaggcagaggcggaatggttagaggtctgtgtgtgtgtcgggggaagggaggtaatacgttcttgaacctgggtatgtggggaattcagggtcaagggacaaacatgggagggcttagagaggcagaatactgtgaaaatgccattgatttgggatctgggtaattggttgccatttgagagggaggtttcaggagaatagggtgtggatgcatattccaataagtcaagaaatagtgggtatgaaaaaaagacagatacagacatatctctgatagcaatattccgcacccccctgcccctttttttttgagatggagtttcgctcttgttgcccaggctggagtgcaatgacttgatcttggctcactgcaacctccgcctcccaagttcaagcgattctcctgcctcagccttccaagtagctgggactgcaggtgcccgtcaccatgcccggctaatttattatttttagtacagatggggtttcaccatgttggccaggctggtcccgaactcctgacctcaagtgatccgcctgccttggcctcccaaagtgctggaattacaggtgttagccaccgtgcccagccgtgaattctgtttttcaagaagtttggtaaggtaggcacattaaatgcgaaacatccaagggcgaacccatgatattcacacctcaccccaccctcctcccacatctcctatcacatttcctatctcagtgcatggcttcccttctagattgtaagctccatgaggtcaggggtcacacctgctgtctgggtggatgtctcaccagcatccagcatggagtctgcatgttgcataaatgcataaattaggttaggaccctgtcctgtgggtgtacaaccaaagacccaagcccactgctggcagcatcccctaatcaccactcccctcagaaaagaggcctattggttgacctcaggataggagagggcaactagtcccagggagacttgagaggccattgacctcctccctgggctcccacagcaatctgctctctttgcctttcctataccccctacagtccagcatgtggggctctaatccaagttatctgccaccctccagcccacagtcaggaacagctatgggcagctggcatctcttcttggcccccatcactctatccttgaccagcttcttcaccatggtctgccctctctgttctcttgtcttcctggagttctggggatagtagggaatggaaaaggggtactggggaaataaagcctcactaagaaaataaagcctcactgagaatggaccccaaggtcttccttggtggattcccagggagctcccctccgtcccccatattcacgtgtctctctggcgatctgggaatctgtgtccctcacgttagtctctgtcgggttttctttttttttccttggaagaggagatgaagggaagtgaaaggcggaatcaaaagtggggagggtctttgcggggccgcagtctttggaattgcgggcgataaatcaactaagtctctttaatattgtctttcagaagttcacacacactcacacacagatcagaacaaggcggggccgccgaggggagcggggagcggggacttgggaggtccatagcctggattcccttctgcccggctgcccaggggctgggatgggtggaagggagtatttacagagcgtttacaggcaggtttcttatcccagggagaagggtcctacaccaggaacttcccaaatgtccttaaaaaaagcaaaaggaaaggttctgggattagcaagaaaataggcagatacctgggtggaggagggacaaaaatgtacttgcaaaaaacaggagtgtgggggccttactaccccagggctcggtccttttgccggaagaaagggaggggtctgtccgtctgtgggcgaggcctggagccacaaacccaatcactggactgaatcaccccgcggagaagaaaagaaggcggagcctgccgacctggaggcggggttttgtcagagctggggcggtgcttatagaggaggcggggttttagggaccaaaccgaggttgctcggttgggggcgctacactttgagggtgagggggcctggagcgactgagggtccggcgtttggccgggatcccggaaagcggcgtccctgggggtgtgggttttggaggggttcctgaggaactggattccgagcttgctcgcaaggcgagacgttccgtggaggcggagtttacgatgtatccaagtctgacggccccagaaacgggtgtgcagggcgcccattgggtccgcggtatgactgcagaaagagcctgggagatcgaggggcgcagagtggggccggaccaggggcgtttttagggatcccagtagttctcgtggtgctgcgcggcgatgatgatgactacggtgaggatggtacagagcaccatggccgcgatgcccacggccagggagatgaaggagaagttccgggcctcgcgtgaagcgatctcggccgacaccatgtctccgcgggccaaggccgtgcgcacctacggaggaggggtgggggaaggaggtcaaagagctgcggcctcgttcgaacgcctcagcctttctctaagatggtccccagaacgcccagaactccctgtccccgcccccaaaccgagtatgcccctgccccctacctgcacggccttgaagatggcaatgatgccagtaggccagaagcaacagatggtggtcagcaccgcgatgggcatgtagtcgtgtggcgggcgcctcggctccagtagggccagccctgggccctggggcggcggggggagagtggaggtcactcctgttccccccggggtcccgcctgcatatggctgtggaaggaaatttggggggcaggggcatcactctgaccctctcccagcctaccagcgttgggcggctggcagagtggctttaaaagcacaatttttacctatggcttctcaaaataaagcacccattacccttccaggacacccataaattccacctaagcccctctcctcccttccttgcttcattaaccaccatattcttgggctttctacattctctcccgcaaggtatggtcccactggggctgtcctggcctcaggtcagaccttctttcttccctccagacacctaccaggcctcccctacccccttagtcccaggcttctcccacatccctcttggttcccagcttccattccccccgtcccccgccaggcggtttcctactttcagacctcctctgaacctctaggctccgatccccctcccaggccctgactctgggcaccagtagactcctactcccgtgtctctccctagtccttcctgtctcaggctcccttctttctagggcttgtcccgggaacactacctgttccctgcccttgttcctctatcctaccagcccccagcgtatccccaatttcaagtcctgtatcgcgtccccctctttcccatgtccctgtctgcccggcactcaccgtgcccaccgggtagaccggcacgtaagcagtgcaaggctgcagctgcagggggtatccgggcgctacgtagccccccagcggcagcgtgcccacagtccccgcgtgcgtgggcaccacgaagccaggggcctgggcagtctgggctggcgccggcgggggcggggcggcggcagcgggcggcggcgggggaagtgggccctcgaagcgagtctcctgcaggtaagggtcgggtggcatgcggggcaaggtagcgcagccgggtgggggtgccccggcagcagggccgggaggggcgtggtgggggggcctcggcagcgtggcagaggaggagggaccgcgctgagcggtggccgcggaagaggccaggccccctgcccctaagcgcgggagggtggcggtgccagactgatggtagtggtggtggtggtgatggtgtgaggaaggggctgcctgtggcggtggggctgggggttcggctggaggctgaggggcattgtagggcggcggagaagtgtgagggactgagtctgggagtcctgggggaggtgagtggaggagagtataagaggaaagatgacacagtgatgagttgaggagggggtaaggggaaacacagccggtcagggatggagaaagataatgggagagacacatagagagagacgggtgagaaaccatctctaatttgaggggcaagagaggggctgtatctaggccatctgcccccctccttcttccttccaatctagttttgaggtcacaactctggtctgcttcttttctgtctttttcatcaccatgcacccagctctcacctgcagacctaatcccctctcctttgctatagctgcctttgggctggcctatccgagctagtcctgtgtgtgcgtatgcgtagacatgcaaccctgtgttaatatgtgctcaattcaacagttgtataaacacatgtgggatgacatgtgttccactctgctgttccttcagtggggggaggagtgccccagcctctgtgagaatctcgggacctcttttagggcagattaagaagagccctctggattttgctcccttgacaacccccatctggtcatgtctccatatttcctcacaggatgtctccatgccagccagtgattgtccatctgtcactcccaatgatgccatccctgcaaaacctggctgtacctccttcaccctctcaacctacccccctgaccatgttgttggcaaggggcagaggctgccactggaaagaggaaaggaagagaaagggggagacagaaagaggagggggactgggggagtgttgagagctggagagaaggggaatgaaatagaaccacagctgaggaggggtaagggagggggttggggcaagggggacggagagtctggagacagtggagggggtgggaggttttgttattgtttttacctgacttttcggatgacatgcctgcggtctcgctgggacagggtccctgcagccggagtgggggtcctcggccggtgctggagtctgggtgctggatggcgcagcggcagcagcgcagagatggagagatgaaggcagcggcggggggggggggcggggggggcgggcggagggagagcggggagggggggagcttaaagggaccgaggcgagggagggggagcgcttcagatgtttcccactcggtctctctctgctctcggaccacctctctcctcctcttaccccggcattcaagcccccagtttgggctcctttggagttgtcatggaaacacggaggctagaccaggcgaggcgggtgggactaaggaaaggaaggaaggagaactctctggagtctcccccaccaagactcagtgattgtattgtgggaggaagtgaacaggttctcagtggagttaataacccaggtgcctccagaggcaggtcgtctccccctcttagctccctgcaaggtgccagggtcttctcccaaatccttggccccagtttcctcctctttagaagagataaatacttgtgtgtgagagagaattgtgcagagttcagaactgcgatggtctgaaaagttcccagggtttggtgaacctaccaacctagcagtaaagagggaggcccaggtctgtaaatcagggggagctgggccttggagggaaaagggagagagagtttgggcggtgtgcatacataccttcttcgtccaggactaaggagctgaagctcttttggagggggtagggggtatgacttaactgctcatttctggcagctctgttggtaatgtgtgcttgttcccccactttccctttgcttttgaggctgcttagagtctctgggctggtcaatgttcagatccattccctaaacccccctactcccacccaccacctcccaccaagacgcatctccagctcctgagtcgacctgcagtacagcgttattagtctttttatttgcttattgcatcttgggagcgcgtgggtgggtgaagggagcgaggataggaagtctatggagatttacaccagtttttttttttttttaaacaaaaacacagccagataatcattattcttcccttacgtccccccagcccccacctggggcagtcgctctcccggctgcgtcccttttcgtccatgtcctagcagagactacagagcagtacagaggctctcgctgaaaccagtcccaggctccacagagtcagatcacggcttcacaccagtcgttctggtcacttaggcgttcgcgtgagcgctcaaccccttaccgccacctcatcgtcactctacaccattctgagcgcaaaaatgttttgattgagacaaatttagaccaagcaatgaccttgtaaacagagagaggggctcagacatgctgagaaatccttatctctagagaaacgtctttaaatgctaagtaaaagccctagcaagtaaaagccctgaggcactagggtgtcggttaggggtcacaggcggagaggtggggcgcctgggggtttcggtagggagccacccacagataactcagacagccagattctgggggtcgttcaggttgaaagactggtcgaaattacgcgggcatgagtcagcgcatccctacgcgccctccgccccttgagggtgggtcgcttatagggaggggagtagagtagggcaggagaaactgggccaggctgcacttagctcaaggggcctcgaggactctctgcgtctctggagacaagggcactacacgcacttcagaatgaagagttgtaagtcgctgacctggggcggactggagggtggggtggggtgggtgttgaggggcacgcccgggctggcatcagccctccaggccaccctgccactcacccagcacacggcaaaatgcagaggactacctttccctggtccgccccctggccgccccttggggaatgcaaacttcgtgttctgctgcggagccagacgcctgtattgggaagtggggagaatcaaggcggggaaatcggactttcgggtcgctgggggcaacgaagcctggagaggccttctttccattcccagaatatgtttgctgctttttcctctccccactggcctaaatggatcgctccgcctgtttcctccccagcacctagggcgcaatggaatattccattgcccctcctgtcctgggtctgtgttgcggggaacgctcgcgcggttgccagagaaagccccggacgtgacggatttgcgcgaccccaagcagcccgcccttccccctcccatccgtcattcccctgcgttctctttcctcacccttccccccgccaccgtgggttccagacttgggataagtaaacagcgggtggagcgaggcctacggacccaggccaggtgggagtctgcactcttcaaggggcctgggctgctgctcacgggtattaaagaactccgcgttgttcatggctgaggcgatgcattaggaagatcctggacctagagaacaagtcccccgaacgctgagttggaggcgggacttcgggtgcgcgttggtgcgtcaacgtggtgggggggtgtgtttgtagggagagggctggagtaagttaaaagtaggctattttgtgacacggacctggtgtgggagcgagaggaggtggcttgattgccgggcgtctgttccgagggaggagggtgttgccatctccctcacatgcccttatcacccctttctcaggcgggagcatgctggggctctgggggcagcggctccccgcggcgtgggtcctgcttctgttgcctttcctgccgctgctgctgcttgcagcccccgcgccccaccgcgcgtcctacaagccggtcatcgtggtgcatgggctcttcgacagctcgtacagcttccgccacctgctggaatacatcaatgaggtctggcaggggacacctgggtgcagggcgttagaggcgtctactgtggcaggggagggagagcggggaactgaaagccacccctctgggcctgcccagttcctcagggagctggtgctggcgtgggggagagttgggggacgggatccctggttctagcagggtacaatagacctgtggacgcgggccagggggtggcgtgtgggagcttcttagcctatccccggtggctgcattgcccccttcccacagacacaccccgggactgtggtgacagtgctcgatctcttcgatgggagagagagcttgcgacccctgtgggaacaggtgcaagggttccgagaggctgtggtccccatcatggcaaaggcccctcaaggggtgcatctcatctgctactcgcagggtaggcgactcccctgcccctaactcctaagccctatctgaggcttgatccttatctgagggacacttcctagcgtccctttttctgaaccacattgctccaggcacaaccctggtacctgagcccttcctttctgacttccctcagcacctgggtctcatctctgtcttgaatgggagggaggctccctacactgctgcccttttgcttcctgttacccatggttcttggacataagggctaatggggcaggtaaaaacatcctagaactagaggcaggaggcccagcatctaattcgggctcagtcacttatatgatgtgtgaccttttggcacagggtgtgcctgccttctgtaagcctcagtctcctttgtgtacagtgtatgtctgtgtgtgtctctgtgtgtgtgtgtgtggtgggggtggggggtgctgctggctttgctgtccttaagtgcctgcccaatgtggtgttctgcttacagggggccttgtgtgccgggctctgctttctgtcatggatgatcacaacgtggattctttcatctccctctcctctccacagatgggacagtatggaggtgagtgggcactagactccatagaatgccctgagttttgggggaacagaggtttatggtcacttagcattgccattcgcttgccagacacggactacttgaagtggctgttccccacctccatgcggtctaacctctatcggatctgctatagcccctggggccaggaattctccatctgcaactactggcatggtgagtggggatgctgaactggggcttccatggatcaggtcagttgcttccacctctgctacaaccaatagcagtgatgacaataaagataacttacatttattgagttatttgaacaggctctgttcagaattttttttttttttgagacggagtcttgttctgttgcccaggctggagtgcagtgcaccatctcggctcactgcaacctccgcctcccaggttcaagtgatcctcctgcctcagtccccctagtagctgggattacaggcaggcgccatcatgcccggctaagttttgtattttaagtagagatggagtttcgccatgttggccaggctggtctcgaactcctgacctcaggtgatccactcgcctcggcctcccaaagtgctgggattacaggtgtgaaccattgcacctggcccagaatgttttaagtgtgtcaccttattgccttagaaggtttagtctgatgtgggagtcagcaaaccttgtctataaagggccagagagtaaatatttttgactttgtaggacatatagtctgtttcacaactcctcaattctgctgttgtagtgtgaaagcagccatgtaccatatgtgaatgaatgtgcctgtgttccagtaaaacttcatttacaaaaacaagtagcaggctggatttggtcctttggtcacagtttgccaacctctagaccagaccatggggccagaatacttgggtttgaatcttgaccctattgggtgcctttgggcaagttacttaaccattctgttactcagttttccttatctgtaaaatattatagcatgtacttcaccaggtggttgtaaggattaaataaataaatgaatgcaatgtactttgaatagtacctggctcatatagtagatactagatagaagtacttgctattgccaggtgtggtggctcacacctgtaatcccaatatcttggcagggggaggtgggcgcatcacctgaggtcgggttcgagaccagcctggccaacatggtgaaaccccatctctactaaaaatacaaaaaaaatttagctgaatgtgggcacacgcttgtaatcccagctactcaggatgctgagtcaggagaattgcttgaacccgggaggcagatgttgcagtgagcggagatcctgccactgcacttcagcctgggtgacggagtgagatttcatctaaaaaaaaaaaagtacttgttactatgtttacggttgttatcactactattattattttgagatggagtctcactgtgtctcccaggatggagtgcagtggtgcagtctcggctcactgtaacctccacctcctgggttcaagtgattccagcgccccgagtaactgggattacaggcatgcaccaccacgcctggctaacttttgtatttttagtagagacagggtttcgccatgttagccaggctggtctcaaactcccgacttcaagtgatccacctgcctctacctcccaaagtgctgggattacaggtgtgagccaccgcacctggcctacattatcactactattttattactatccaccttgactattgctgcagcttccttattgggcttttcaccaccagtcttgcctcccttttctgcttctttttctaactgctgtttgtacccagatccccaccacgatgacttgtacctcaatgccagcagcttcctggccctgatcaatggggaaagagaccatcccaatgccacaggtgagaattcaggctcctacctgtgttgctttttctgcttctttgactccctatgtctccctctccaacctggcctgacccctgtggctgactcagcctctcttcttcccatcctacagtatggcggaagaactttctgcgtgtgggccacctggtgctgattgggggccctgatgatggtgttattactccctggcagtccaggtaataagggattttgtggcctgaagattggctaaagacatcccccaaccccagttggtctttatctcatgcctaaactggcctgctccttccactgttcagttagtgctcctccccccattcatcatgtcacccaagaccaaaacctgggagtcatatcccaaccccttgtatcaagccagtcactaagtcctgctgactcttctcctctccatccctatcaccccctcccccactttataaaaacttttaattttgaaattcttatagattcataggaaattgcaaagatagtatagcgaggcccttcacccagcttcccccagtggttgcatcctatgtaattatagcacagtatcaaaaccaggaaattcacattggttcaatgtgtgtgtgtagttttataccattttatcacatttcctaccacctctttacttacctggactattataacagcctccagctttgtcccctccatcctattccttagaaaaaaatccatggctccatggtactatgtgcttgcctgtgttataggtcaccatgtgtgatctgtaatgtcacctgagctacttgaattgctcaacaaatatttattcaacattatgggcgcaggcttgttctgggccctagggatgcagtggtaaataaaagagaagtccctaatgttatgtagcttatattctagtttgtaagatagctgatacatacatacaaatatatatgtcaggtaataaggcaggggaaaggattagaggatgtccggggcctagtttcaatagtggccgaagaagtcctcctggaaaagtcaccattcaattagagactgaaggaagtgaaggagggagttgtgctctgggtggaagaaccccccagggagaaggtctggcacctgcagaggccctgaagcacgtgtgagcaataaggaggccagcatggctagtgcacaaggagctggggagaggacaggagaggagctaaaagtggtagcaggggaccaggcatgtcaaaccttagcaggtcaaggtaaggcccttgatatttttttttcttttttttgtgataaaatatacataacataaaattgccattttaaccatttaaaaatgtacagttttgtggcattaagtatactcacatcattgtaaaaccatcacccatcagcaccatccatctccagaacttctttttccccaaactgaaaccgtatacccattaaaaaatagactgggtgtggtggctcacgcctgtaatcccagcactttgggaggccgaggcagtggatcacctgaggtcgggagttcgagactagcccgaccaacatggagaaaccctgtctgtactaaaaatacaaaactagctgggtgtggtgatgcatgcatgtaatcccagctacttgggaggctgaggcaggagaatcgcttgaacctgggaggcagaggttgcagtgagctgagattgcgccattgcactccagcctgggcaacaagagcgaaactccatctcaaaaaaaaaaaaaaaaaaaatatatatatatatatatatatcctcatccctatttcccgacagtcccggtaaccaggcttttgatttttttttttaaattctgagtgagatgggaaggcactggacagttttcagtgaaggcaggacatctcttaaaatattgtaataatataatagtaagtgatgagttttatgtacatcatgtcatttcacatctaccacaaccctatgaatgacagtgatagctcatggttatataacatttttaatgttccaagtcactgtttcttccttttttttttttttgagacagagttttgttcttgtcgcccaggctagagtgtaatagcacaatctcggctcactgcaacctccgcctcctgggttcaagccattctcctgcctcacctcccaagtggctgggactacaggtgcccaccaccatgcctggctaatttttagtatttctggtagagacggggtttcactgtgttagccaggatggtctcgatctcctgaccttgtgatccgcctgcttcggcctcccaaagtgttgggattacaggcgtgagccactgcgcctggccaatatatatctctctctatatatagatagatatatattttttgagttggagtcttcgctcggtcgcccaggctggagtgcagtggcgtgatctcggctcactgcaagctctgcctcccaggttcacgccattctcctgcctcagcctcctgagtcgctgggactacaggcacccgccaccacgcccggctaatttttttgtatttttagtagagacggggtttcactgtgttagccaggatggtttcgatctcctgacctcgtgatccacccgcctcggcctcccaaagtgctaggattataggtgtgagcccacgcacccggccttgcctggccaatattttttaattaaaagattttaactccatctggctgggtgcggtggctcactcctataatcccagcactttgggaagccgaggcgggtggatcacctgaggtcaggagttcgagaacagctggctaacattgagaaaccccatctctactaaaaatacaaaaattagtgggcctggtggcgcacgcctgtagttccagctactcaggaggctgaggcaggagaacttgaaaccaggaggcggaggttgcaatgagccgacagggtgccactgcactccagcctgggtgacagagcaaggctctgtctcaaaaaaaaaagaaaaaaaggattttaagacctttctattttgaaataatttcatacttaagaaaagtttgcgcctgtaatcctagcactttgggaggccgaggcatgagcccaggggtttgagaccagcctgggcaacatggcaaaaccctgtctttacctaaaatacaaaaattagctgggcgtggtggtgtgcccttgtagtcccagctacttgggaggctgaggtacgagaattgcttgagcctaggaggccaaggctgcagtgagccgagatctcaccattgcactcctgcctgggtgacagagtaagaccctgtctcaaaaaaaaaaaaaaaagttaccaaaatagcaaaaagcagtcatttatactcctcacctagatttcgcaaatgttaacattttgtcatgtttacattaatatcttttttctctaaatatatatacatttatttatatacgttaatgttatatttaaatataaacatagattcaaattttcctgaatatgcgctcacagattattcaaatttttccaactgtccttacagaaaaaaatatacagtggaagatccaaatcaggatcttgagttgcatgatcttgttacgtctctttagtatctttttgtttgtttgtttgtttgagttggagtttcactcttgttgcccaggctggagtgcaatggcaaatctcggcccactgcaacctccgcctgccaggttcaagtgattctcctgtcttagcctcctgagtagctgggattataggcgcccaccaccatgcccaactaattttgtatttttagtagagacggggtttctccatgttggccaggctggtcttgaactcctgacctcaggtgatccaccctccttggtctcccaaagtgctgggattacaggcatgagccaccacacctggcctcttttttttttttttttgagacaaagtctcactctgtcgccaggctggagtgcagtggcgccatcccggctcactgcaacctttgcgtcccagaatcaagcaattctcctgcctctgcctcctgagtagctgggattacaggcgcccaccacgcccagctaattttgtatttttagtagagacagggtttctccgtgttggccaggctggtctcgaattcctgacctcagatgatccaccctcctcggcctcccaaagtgctgggattacaggcttgagccaccacgcccagctaattttgtatttttagtagagatggggtttcaccacgttggccaggctggtcttgaactcccgacctcaggtgatccgccggccttggcctcccaaagtgctgggattacaggtgtgagccacctcgcccggccagtaatgcatttttgatggggtttctacagaagtgaggtcgtatcttcagtgtatcacctcatgaagtacattatatccagtaaggtagttttgagtgtcctccctgctacctgtctccccagtaggccttgggttcctttgggaccttagcccaccttgatttcttcctttcttttttccttttcttttttctttcctttttcctttcctttcctttttgagatggggtcccgctctgtcacccaggctgaagtgcagtggtgcgatctcgactcaatgcaacctccacctcccgggttcaagtaattatcctgcctcagcctcttgggtagctgggcttgcaggcatctgccaccatgcccagctaatttttgtatttttagtagagatggggtttcaccattttggtcaggctggtcttgaactcctggcctcaggtgatttgccctccttggcctcccaaagtgctgcaattacaggcgtgtgccactgcgcccggccagattttctccagctcttctgataacctccccccaaatctctttgtagcttctttggtttctatgatgcaaatgagaccgtcctggagatggaggagcaactggtgagccccctgggattacttccccttctagccgctgtcccaccttattccagagccctctctgtgactcctgagctgaagggttcaccctgtggggaggaggtccaggatcccagcagtaactcactttgtctctccttgtgtctctcttccatgcttccacgccccttcgaccaccttgaaggtttatctgcgggattcttttgggttgaagactctattggcccggggggccatagtgaggtgtccaatggccggtatctcccacacagcctggcactccaaccgtaccctttatgagacctgcattgaaccttggctctcctgaggatatattcaggggtccccaggaactcctcggtccagagaccaagtggtggccttggaaagcagatgtcaggctttggtgtgcctgtgaccacctcattgctcccatattatcccccatttttagtagagacggggttttagtagagacttggcctcccagaacccccttcctctgctcctccatgaatgacaattccaggcctcccctacctcatgtcctctcatttgggggattgctccgtgctgtccctttctctcaaggccgaagttgggaagtgagaaaccatgtttttaacttgtggctgcttttgctgctgctgctcctccgtatctggctgtatgggtggagaacccaccccctgcccaccacaggggtctccttccaggccactcaggacatttttagcttctctcctccccatgttcccttttttctctaaagtcccctgacatcagccctcccaactcctaagagggactacccatgagagtggggttctgaggctcccctatggggacagttccgttcttgaagtgtcagtgttggggaatatctgtggcctatgaggcccatctcaggtttggggatcccccagtccctatgatcagtgttggagtacccccctgggagagcctagtttctttgaggccccaggccctcttttaactacctttgaataggtgttatccctgtatttatggaaataaagttccatttcctcagtgtgacttggctcatttccaggtggaggggacctggctccccaaggagggtgggggcggagcctgaggcctgggtgcccagatgcctggtctagggtggggacccccttggtgtttccgctctctctcaatgcccattctttgtgggttcctggttctctgcgggttctttcctgctgaagacaattctcttcctctcccagtccccaagactggggggttaagctcagggctccagtggtttgggcctcagcctcatgggtggaatgcgcctgccacccccaggctagacgagggggcagagggtcagggtgggcattcgttgtgccgcttttgagctttgtgggccagagctgggtgtagggctggacaatgagcctcctcttccttgaaagaaggaattttggctgagacaatagggccctgtctgttctggcatggggggtggtggctgactcaattctgttccccctaagccctaacaaatgtcatgaagagaggggggcagttttccccttggtgccctgggctgcccccctgcccctttgtgacgacttgcccttctagctttcctcagctgatcttgctttttctcccataacctgaactgctttgttccctgcagctggttctctccctgccccctaactctcccctagtctgttttgggttcaagggggtactggtggtgttacagagctcatagcttctgatctggggagtccagaaataggggcctcagagggttggaaagatacttctagggagccctttgctggggtggggatgagggtagtgggacttgaccctactgagctgaccctgctggagctaaggaggaggcttgtgggagggggcaggaatgggaggactctctggcccagcccctcctctccttcttagcctgccaggcccacccaccagtctgagctgcttctgctgaggctggtctgcttgaagcctcccaggagaaagaagccaggtgggaatggagagagagaggaaggcaagtggggagagaatttcaaatggggaaagagtggggtttactcagagccttagggtgggcatgagttgcggggtgttttgttggagcaagggatgtgcatttagggcgttatgtgacggtgtgggtatgtgaggggagtagcagtgtgtgaaaggtgtggagtttccaggtgcttggtttgtgtgtacggtgtgaaggtatatagctaggggttttttttgtttgtttgttttgtttgtttttttgagacggagtcttgctctgtcgcccaggctagagtgcagtggcatgatcttggttcactgcaacctctgcctccagggttcaagggattctcctgcctcagcttcccgagtagctgggattacaggcgtccaccactgcgcctggctaattttttgtattttttagtagagatgggtttcaccatcttggccaggctggtctcgaactcctgacctcatgatccacccacctcagcctcccaaagtgctgggattacaggtgtgagccaccgcgcccaaccagctagggttttgaaggtatgaagttataagagggcatgttaaagacaggagggttggccaggcatggtggctcacacctgtaatcccagcactttgggaggccaaggcaggcggatcacctgaagtcgggagttcgagaccagcctgaccaacatggagaaaccccgtctctactaaaaatacaaaacaaaattagccgggcgtggtggcaggcgcctgtagtcccagctactcgggaggctgaggcaggagaatggcatgaacccgggaggcggagcttgcagcaagccgagatcgcaccactgcactccagccagggtgacagcgagactccgtctcaaaaaacaacaacaaaaaaaaaaccaaaaaaaaaaaaccctagctatataccctcacaccctacaaaacaaaacaaaacaaaattagccaggcgtggtggcgcatgcctgtaatcccagctatttgggaggctgaggcaggagaatcacttgaacctggggggcggaggtcgtgcggtgaggcaagaacatgccattgcattccagcctgggtagtaagagcgaaactccttctcaaaaacaaaaacaaaaaaaaacccaaaaaaagacaggagggtcataaggggagggttgactgtgtgtccctccaggttgtgcagaggggattagaagtaagtaggttagaggggaggtggagggagtgtgctggggtgtgagcttttatgatgctgaaaggatcatgatatgctaaggacaggatagtgttgggttgtacacacaggtgtaggcaatcctggtggctagtatgtaaaagtgaatgtcctgactcccttagagggtacctgcagagtgcccttggagggactagtgctggagaaattaataggagaggggacgggcatccattaaccttttcttgcctgcagcctgtagggtccagcgtcaaagcgaatcatggggtccagggctgagctgtgcactctcttaggcggattctccttcctcctgctactgataccaggcgagggggccaagggtggatccctcagagagaggtgacaacagagggggtagggcccggggtgagctcttctcaggagccttctgctgggggtggggcttcacaggaggcaaaacataactgtaagtttagaatgggggtgagaggctgtcatctggagggagagcggggggcctcagtagcctcttgagggaagtgggactcctggctccccagggcctggcctactcaatctctcccacctcatcctctggcatggacgcagtcagggagtctgctccaagcagacactggtggtcccgctccactacaacgagtcctacagccaaccagtgtacaagccctacctgaccttgtgcgctgggaggcgcatctgcagcacttacaggtgagggatggggagatgggaccccaagaaccccaactaggacccgtactcagggtcctgagccgggcgctgtgttccaggaccatgtaccgcgttatgtggcgggaggtgaggcgggaggttcagcagacccatgcagtgtgctgccagggctggaagaagcggcacccgggggcgctcacctgtgaaggtgaggctgggtcttccgggccttgcgggaggcgcgccccacggagctggggagctgggtcgtcggtttgagtctgaaccccacttcctctgtcctcagccatctgcgccaagccttgcctgaacggaggcgtctgcgttaggcctgaccagtgcgagtgcgcccccggctggggagggaagcactgtcatgtgggtgagtcagcttgtcctccccacctacccaggtgcttgcccccgccccctctctcagccccttccttttttcggtaactagacgtggatgaatgtaggaccagcatcaccctctgctcgcaccattgttttaatacggcaggcagcttcacctgcggctgcccccatgacctagtgctaggcgtggacgggcgcacctgcatggaggggtccccagagcccccaaccagtgccagcatactcagcgtggccggtgagtgggcaggagtacgggccacccgagggactcgggacgggcgtccgggctcgggtagtggtcacactcttggtctcctttgtccctagttcgggaggcggaaaaagatgagcgcgctctgaagcaggagattcacgagctgcgagggcgcctggagcggctggagcaggtgagccaagcctgctgggtggggcgaggccagacgtcactgtcaataccctgaggcatctcttcctttctagtgggccggtcaggctggggcctgggtcagagcggtgctgcccgtgccgcctgaagagctgcagccagaacaggtggctgagctgtggggccggggtgaccggatcgaatctctcagcgaccaggtgctgctgctggaggagaggctaggtgcctgtgagtcctcacactcctcccgccttgacttctattccccaactttccccaagacccctctccattcaggcattccctctttcctccaagcccctctccaacattcactatcctcatgcctctccactttaccatcgttctcttctgaaatcctgtccccagcccaacagtttcacttattgtttggtgagagtggcagtgtagtccactccaggctgaccacagccactgtgtctgccatgtcattaaccaggctcctgtgaggacaacagcctgggcctcggcgtcaatcatcgataagaagcctctacagcacccctgccccctaatttatacagaaaccggacccactaatcctctgggattggccgactgtgagctgcagataaggctatcagccaccaaagagcaatgaacaatggaaacttcagagagctgaagaaagggggaggcctgtgttcttggcctgcccctgagtcttctggctgggggcaggttgcctgggcaagaactgcttcaattccttaacaaatgcaaccaccaacacccagatctctctctctctttattttcagtttttttgctgttatccagataattaataaaaaccaaccacgcaaaactgggtcccaccctctccttttgctcccagcctacctccccagttgtgggaacaggtctggagtgagaggcagggagtggctaatgccaccaggaagaaatgaaaactggctcagagagggggaagcctcaacagaaaaagaaataaattaaaagccctcctatcccctccagccagggttcgttcctttccccaactccccagggggcagaagtgagtgcagcacctgatgtctgcttcttccccttgtgtctggtgagatggtgcagcagggctgcagggggctgggtggggtcatgtccactgaagaactgtactatggggacagaaaaccagaaatgtggagactgaactggtatcccagagagtgcacgaccctgggcatctgggcaagggcaggcatgagacctctgaattagaagggtccagcccccactgacaggaggctacactgggagggaaggtgaaggtgctgaggaaagctcccaggatgagcctgggagtgcttcaggtatcagcttccagccagagggcgagaagtcctcctcacaaatggatgagtccattgaatccatggactttggagtgggggggatttgttccaaagaatggatgagtccactggccaatgtggggtagaggggtagagaagaccacataggaagagactccactggggatggaatgttcccctcccttgtgtaggctgagtcactggagatgagggggaggcaactgtcccacagacaagacagtaggaggtgggggtcaagagtggagactgcaccgaggcaagagtccatggatggggccaagagggggcaggagtggcgctgtatccacattcacttcagaagttgaagattccaaataggagaataagtggggagaggggagacaaggaagagggtttggccctgcttcagggcccactgggtgggtaggtgtggggaggaagatggggacagatgggaggagagctcagagccagggttcacccaccgcccccaggcttcttcagatagtcaccaccaccccggccatcagtggagatttcccggaaaacagtgagcatggagtgccggactctgtcagccagagctgggacgtcatctggtgtcagcccttccgtgggcactgggggcagcacccgcacctgacattgtcctggggcaaggggagcaccatcatggcctgtccacccaggtctttgcccacaggtggggcccagcttccgagtgatactcttcctcaacctttcagttctcttcccccaaccctggacaaccatccctgggcttgccagctgccacttctgaggcccttctcctatacaaagccttctccaatccccagttcagacatctcctcagcacccctccagcccccctcctctgggtttggcatttactgctgaatgagtgttattcattacagctttgtgcacacaggccttatctttcctgttaagattagtaacagcctctcttggtgggaccaagtgctacccatctggcagggtatggtgggtgcttagtaaagacttattggctgatgtggggttagactagatgactgtgtagacatctcatggctctgacactgaatgatccccctgcctcacagggatgtcctcccagcctctccggacacaccctaccccagaactgctcaaagccctcacccgaggtgaagcgacgctccttcttgcagtagaagtcttggtaggaggacatgactatggggacaatgggaacctggggaagggttaaagcaggtcagtccacagctctcttcagagactcctacaataagcccctgcccagagatgagggaatggtgggggttggcagctgagtagcagaacgaagagcagtagtcacctgggcctgcactgcaagatggaaggcgccacgtttgaagggcagcatggagccattgtggtttctcgttccctcaggaaacacccagaccctcacctgggggagaaagagggtcaaagaagacaaatacatatggaggagtcagaataggtgtgatgttataatgggacctttgaggcccactggccctgcatatcagtttatttacaactgttctactctgtatccctccaatcccccatttccccaggatgactcacgtcctgggtgagcagggtctgggcgacctcagacatgacactgatggcatcccccgtgcgcttccggtcgatgaagatgactcctgccagccagcaggccagcccggcagagccagcccacagtagctcgcgcttggcaatgggcacacagcggcctggcagtacctccatcatcccttgggcagggtgggagtgggtgaggatcggggtggaggcagagtgtcacagaaggcaacccacctcacccagctcatcaccctctggtagggactggaggtgaaggaggagactaggcagggaggggggccccaagtgaaggaaagggtgaccaaaagtatatgtaccctgcttatgagggcagttctacccagggaatgaaggcctgagtgggaggcaagggggcaatgtcccagaggaaggggaattgaggatctctaggagaagatattctagggaaggtttcaggaggggaggcatggctgggggaggtgtgccctgtggtggggtctcaccaagcagatcgagagagctctggtggttggagacaacaacatagggctgcgagggagggaagtggtgagcccctcgcacctccactcggatcccgtacaggtatttgatgtggagcagcattagacgcaagatcctgtggggtcatggcaaggggtcccagtgggatccattgatgtccatctgcatgcctcagctccccccaccttactgtctttctgaccacctttgcagtcctctccccattccctgtctctggtctctctcagtcttttctacacacaccatgcccccttcccccaatccactactcactttgtacccttaggttccctcattgcccaagaccccttgcccctcacttcatgttctcgacgttgcgtcctcgcacggcacacacagggatggcgagcacagccaggaagaggatccagccattgtagaaggccatcttgaagaagtacttggcactggggctgcagaaccacagggtgggcagcaggaagagcagcagcaggaagagcagcagcagcagcatccatgcccctggccacaaatccattctggccacctgcaggggatggggcaagggacaatcagcctggtttctggaggagagtggggtaggcaaggcacagaaggcagggctgggggctggtgctatgaggacaagggcctgagacacaaactggggcaggggtctcattgaaaccttcccaggaaggctctctaggatgagggtggtggagaaagagctcaggactgctctcccaccactcttcccaaaggctccggatatattcagacaagagacacaagacacagacatctacaattcacagatacctgataataaatgacaacaagaataatagctaacacttgtagctggtaagggtcttataatggtctatacttgtgctgtccgagaaagtagccaccacctacatgtggctacttgaaatgcagctagtctgaactgagatgtgctggaaatgtaaaatacacatcagatttcaaagactgaataaaaaacaaaatgtgagatatccattactaatcttttatgctgactacattttgaaattataatcttgggccgggcgcagtggctcacgcctgtaatcccagcactttgggaagccgaggtgggcagatcacgaggtcaggagttcaggaccagcctgaccaacatggtgaaaccccgtctctactaaaaatacaaaaattagccgggcctgttggcgcatgcctttaatcccagctactcgggaggctgaggcaggagaattgcttgaatccgggaggcggaggttgcagtgagccaagatcacgccactgcactctagcctgggcaatggagtgagactccatttccaaaaaaaaaaaaagaaattataatcttttggatgttatcagattcaagaaaatatattactaaaattaatttcactctttttgccttgtaaaaatgtggctaccataaaaaaattacattgtggcttgcattatatttctgtagaacagtactggtctatacattaagttaaactcttaaaatgatgcatatgatagtctagaaagtactattactatttacattttataggaaataggcccagggaggctaaataacttacctgaggtcatacagctcctaaacagcagtttctaggttaaatctaagccgcctgtgttcctaaccactccattacgctgacactggtatgtattgcatatatatatacgaacacagcacacagcatatatggtgattgtgacagaacactcacagccatatacccaagggccaaatggcaagattaaaagttcgtgtcactaatgccaacagacacacagtcatacaaagactaacatgttcacacatagacacaaatttataattacacccagtgacagataaaagaatgtaaatgcataactagaaaaatccctctccacccaggcagctcccctattcctaggtaaacttatggacatacctggaatagctacaaagaccaatcctacctccagacaggcaaacgaatcctactaccctttcccttccttctagtgacactttgcgtgggcaggtacagtgtgtgaggcctcaccaagtgaaaaaaggagggaatggagtaaaggtgacctaacagcacttgccctgggagaggaaagggctcaagaggaagagaggcaggaacacagaacctgtgttctaggttcttcctccttcctccactctgccccagtgttgggggcagggtaacaattcacaaaaagggtgttcaggcaaatacctgtcattcctactgaggccacaggcactgtcttcccatgatgggaagggctatgctcaaaggtaagcctattgccaagcgagaaggtaacaggcaatagaggaaacaggagaccctgccagttggaataccgtaggctttctgagctgctccatcccactgcccctacaagttcagaacagcatcatttctcccctgaactatgtggagtaggctcccaactccctccaatccatcttccacgtagcaaccacagagatttttctgttagcacagatttttctgaaacacagagcatttccctgtcttgcctaaaggctcttcttgataagttgacttctgcttacatcttcgaccacatcctcacaaaactctttgttccagtcaaactgattcacttcagttcctcagacaccatgatctttcatgcttccccaccttgaacatgctgttccctttggctggaatgcctgtctcttctcctgcctcacacagctcagtgtcaccttttggagggctgcctgaacccctccaggcctgtgctttccttacacttttatcttgatcagcgggtctcgaagtatagaaatgcaaattattagacttcaccccagatctactgaatcagaaattctgggcattaggtccagcaatctgtttttctttttctcactctgtcactcaggctggttttgaactcctggactcacgcgatcctcctgcctcagccttccaaactgttgggattacaggtgtgagccatcgtggctggctagcaatctgtatttcaacaagccctctggtgagtctgatgtgcgcctgaatttaagaaccactgatcttgacaacacactatgtgttgactggcgtttttgtttccctccttaggctgtaagcagcttaaggacagggactctgtcttatctccagtgccaggacaataggagatggagtaggtgctcaataaacacttgctgaacagattctaaggctgtatacccacccatagagccacagttaatgacagagatggcggttctgatcacaaattagatagttatcctcttgagtagaagtgactactaaaagaagtcactgagaaagtaacgaacacaccaagcctaatggtaaccgactctgaatagatacatgcaatacatagccataatgaaggcagagtaacaataatcaggaagaggtcatctcacaagagaaatgtaccgaatgggatcaagatgccacagggaaagatgctgctctcatcaaatgtgtgccaacagtgcaaagaatggaggataatgtccataaataaataccaacaatggggttcacagcaggattgaccctgtgacatgcattgagctcatggacacagactgtacacagccactggaaagataatgtttgtgtagagaggtatgggccagggaggtcaccaaggtaaggcatgcagggatggttctttgcagacctggagacccagttaccttcttctcttaacacttgatattaagtgaccctctttggagaacaaaagtccaaggatttagaaatgcaatggagggccaaatttaatgagcatacggctcacaaaatatactgatgacaaatttataacacacattctatggtcctgttacatcagtgtatcatgcaaaggcgcatacacatgtgttctgtgaactgtgactgggaaaacacagcaaacaggccaattcagtcagacatcagagtgtggggtattcagccaagccatgggatcccacacatgaagactactgcaaatggtaggaccatggacatgtcagccaaagcaaaataaggtatataaccttcacatgctgaaataaacatgccaaaacataaaatgtgcaagtaacatgaaattatagaacaggtgcaatatatgaaaactcacacacatgcggtacttaaaacatgtcaaaactggatgtgagacatggacacaagaatgaagaatgggcaattctgatagaaaataacacaccatttctacacagcctatggatagcattgggacaacctagttgcacacaagccattaaacatgtcaaaggcacacagactcaatgtagaaaacatggctcccataaggcatttgtgtgtcagtaagggtctagcagtgtggaaggccactgagaaacaagaggtcctgtgcctagatggaaacagaggcacctaagggtattcctaagaggcaaattctgctggccttctcccctcatgacccttcaagagtcatgtggggtcaaagggcaagaaaaggaattggggaaggtgtagggaattccctctccaggattccctgtgcacgctcccagtcccaaattcacaagggtttccatttctcctccctcccaggtctcttccatccttcctccctctcaggtcccctctcctatccccagcaaccctcttcccagtcggcccctctcctttccccagcaaccctctcccccagtcggccctcccagacccaatctctccccttcccctcatcctagtcgctttcagcaccctcttccctcctcctcccatccctttcccgcccacacctcagaggggtagggggcctggggggctggccccctccccagccaggctgcggcagcggtggtggcggatggctgtgtctctgtctctgtcggggtgtcggtgccaagggggcgacgggatttgggggtgtcctagccccggccgatggaggggaggtgggagtgggaggttgggcccatagcggtaggaatggtggggggctgtccccccagcaccctccctccctccctttctgctgtctctctgagggctggggctgctgccgccgctattcccccgccacccctccccaacgcctgctggtttccggggccggccaggaagtggagggcggtgatgggcagcctgttttgccaatcgtctcccagaaactctggcatctcctccccacatctaccagtgtcctcttgcgagccccggcccagggctctccctcggtctttgcccccatctctggctccagctgcatcttttttttctctaactccctttcagctctggatcccctggtgctgtattcctccttccgcacattccttcctttattctccatcagctctcttttaactgccacttttacttggtctctttttttctcaactccggttatctgctgcttattccccccaactattcttaaggaccccttttcccgtacccattcaattctaaacatttatcaagcatctacctaccatatgacaagcattaagttcacctctcttctttttctctccaggactccatctcactccatctcactctccagtcctctggtctggtttcctttgccctttgtccctcactatctcccagcagtccagctcccccctccacctgccttctctggcctttaaagagaagagatctctttggccttatccctgaccctttccttttccatgctcttttacctctgtaccttttctttcctacttccttcgtatcagtctccttacttgcccaagctgagacaaccccttctcacaacatacaatatgggtacatcttttcttccaatggaaatttggcttcaggggtgctttctagaaaaataaaaagtgaggaagaatgccgattcctctggaatgcgcgtgcctccttaatttggtagccatgtatctagttttccaccccctcttctcttcctccactcccattatccctttactaggatcattccatcacttcactctccttcatttccacctttccctctcaatatcttccttcctaaacctcaagcttcctgaatcctcatctgccccagtccttctttacgcaactgctaacttctcatctttccttactcttgagtcacatgggatcttttatcaaggtcccccctctagccacacctttaccctgcattagtttacatgccctcgggaagaggattggtagtgggaggactgttacctaattctgctcctttagtcacagtgagggtcagtgattgtaggaaaagcccaaactccccggggtccaacctgggaagaagaccctatttctgatgggcaaattataaagaggaaagggcgggtctagcctccgcgggtctccttaaaaggggcgggctttgtcccttttgcaccactcacaaaggggttgagcccagagctttcctgctctgaaggtttaaaacggagttgaagtcaatcctgttctactctgtgtacaacattaagaaaggggtgggcctttagttcagttttgctctgtaaatcacctaatatggggagggctgagtcgtccagccgaatgagttgggttaacaccagcgccgcagatcgatgttcccactatccaaacgtcgggctaatcccagttctgctcccttaactaaaagggaggggcagacccaagttctgctctctacgtcaccaaaggaggttggagccattttgaaccctgcgaccctagtgttttccctcttttcctagctcttcgccgtctttcccgatgtcggccaatcaggggaaaaggaaaaggcccaatcagcagaaagtccacagctgaaggacccggatgaagcgagcctaggactttgaagtgcaagcctcgccaattgtagagcagtcaccatggcgacaagataggggtgaagaggtggaacaagagaaggttaaaccctcacaggattggcccacccccgtcccgccgcgtgctgcgcaggcgcgttttacctaaccaccattttccgtcaagttttagccaatgagttgatttggagccatacgctccaaagtccaatagcaatccggacattctctaaaagaggaagcgaaggaaagaaaggggcttatagtgggcgaggtctataggtagtcccgagcaaattgcttatggctttggttatgactgacaactactcagacgaataaagccctccttggccaggcgacagcgtgtagcgagttattaccaatcccttggcattgcacattgacttagaccgtatcagccaatagccattgtgcgaaggcaggactgcactaaccttttcccgcccctaccctttgggccaatcctttcttttgaattctttgtgactggcaggcattcagaccaatagtgattaggaaaccttgaagcctgcccaacgatcgtgggcaggaggtggtttctggtttgttggggcgtgtgtatgtgtatttggggggactgaagggtacgtggggcgaaacaaaaccggccatggcagcagcggaggaggaggacgggggccccgaagggccaaatcgcgagcggggcggggcgggcgcgaccttcgaatgtaatatatgtttggagactgctcgggaagctgtggtcagtgtgtgtggccacctgtactggtgagaatcgaggaggggggcgggaggtggtgggtctcgcttatatactggagaggctaggagcgaataatcatacagtcatacagataatcggagggcacgttcccataggtgaagcccgacaggagacataagactttgctggtatgtgtgggtgggagtataacggtcgagatctgtggaaagaaaggtcttaggaaccaggagctgaggcacgtgatgtgctgagaagagaaggtggggcggggagtggcaggacaatgtgagacccgagccaccttaccccagagaagtgaggggtcttagctgtgcaggtggaaacaagtgagacacaaaggttaagggaggcacgcatcagttgagtcggggagaaccaggaaatatggatcacattcagatgagatctgggagggggctggtataagggcactgtggagaggcagacttgaaaggttaaagggtcataaagatagggacattattgagcttgaaagtgagtaatgggggaatgtgctagtaaaggggtttggtttggagtgatggggttggggttgaaaagaggagacccagaaagaggtggctgaaggaaattagaaattaacttgaaaggcagaaaagagagggcacgaaaatttgtatgtgtttgttggggagaggagaaaggagagggttgagtgtgttgaggatggacagagctttaggtgttggaagatcagacaagcaggaaggctaactaagttggctggcatggtagaggttgcagaaaatctgaaaagcaacagcaggttgcttgggaagaggggttagatgggattctgcgaagtctagggtctgtgtctctcttttctgtagctagtttgacctttttttttttttctcccccatccagttggccatgtcttcatcaggtgcgtactcaggagatgaagagggaaatggggaggtctgaggagctgtaagaccctcttgtatactggaaaccaccttttttctccccagtggctggagacacggccagaacggcaagagtgtccagtatgtaaagctgggatcagcagagagaaggttgtcccgctttatgggcgagggagccagaagccccaggatcccaggtgagagactggaggtgttgcttagggaagattgaaggcttctgcccttggaaaacggtgtggaagatgggaggagaaaaatccctgttaactttctctctccacttcctcagattaaaaactccaccccgcccccagggccagagaccagctccggagagcagaggggtgagtcttcttgtccagttgtgtcccttccttgacagatttgccggcttcccgtctgactttttctgcctccctagggattccagccatttggtgataccgggggcttccacttctcatttggtgttggtgcttttccctttggctttttcaccaccgtcttcaatgcccatgagcctttccgccggggtacaggtaagagtcacactcagctcccatcagggagccctgtgaatcccctcaggccccctcccagcctaggagcatatgcttccacagctttcctctctcccacaggtgtggatctgggacagggtcacccagcctccagctggcaggattccctcttcctgtttctcgccatcttcttctttttttggctgctcagtatttgagctatgtctgcttcctgcccacctccagccagagaagaatcagtattgagggtccctgctgacccttccgtactcctggacccccttgacccctctatttctgttggctaaggccagccctggacattgtccaggaaggcctggggaggaggagtgaagtctgtgcatagatgggagagccttctgctcagaggctcactcagtaacgttgtttaattctctgccctggggaaggaggatggattgagagaatgtctttctcctctcctaagtctttgctttccctgatttcttgatttgatcttcaaaggtgggcaaagttccctctgactcttcccccactccccatcttactgatttaatttaatttttcactccccagagtctaatatggattctgactcttaagtgcttccgccccctcactacctcctttaatacaaattcaataaaaaaggtgaaatatattgatgggatctcttcccaagttcgcccccacccccgacagaagcatcttctccccaacttgagtagatgtttggtatagtatggtgaagtatgggggtgagtccctttccttcagggccctcaagggtataggggtgaggttgtgtctcatacacacacacagacacacaagagcaagatgtgtcaggtgtttaatcatcattgtggggggctctggttgtagaagaaagcttggcaaggtggggttatacaggagagagattatacaggagagagttggtctgaggccagaacagttcaagggaaaaagaaaagggagctgatggatgggatctgtctgtgggcccctcaaggccctccagtactactctcgcctgcctcaggttcctccgactgattcagttctgcacgctcctcctcttcctcctggttttctggggccttcctgaggagaaagattggggggaatgcggcacgttgtcgttccaccccccgacccctcttcgcttgctgcctggaagccctaggtctgaggggtctggctttctccactcacctctcctctcctcggcgttgccgcctttgccacaagatgaccccaatgagcagggcggctgtccccaggcctcccaggatccccagggccagggctagagttcccagccctgatcctcccacagagcctgtacggagacagggaaaattgagagcacagccaccaccactcaccattcctttcttgttgaccatccccccagtcacatgtgttgggggctatcttctgcttccctgactttatcaaacccctcacctgcagttggcccctcctcgcctggttctggaagacaaagttggatccagtcagaaaggaagacttcgggttgagagagggttatttagtgggagccccagtggagtctttccctttctttttttttttgagatggagtttcacttttgttgcccaggctggcatgcaatggtgcgatcttggctcatcgcaatctatgcctcctgggttcaagcaattctcctgcctcagcctctcaagtagctggcctcccaggtagctgggattacaggcatgtgccaccatgcctggctaattttgtatttttagtagaaatggggtttctccatgttggtcaggctggtctcgaactccctacctcaggtgatctgcccgcctcagcctcccaaagtgttgggattacaggcgtgagccaccgcgcccagccgtctgttcctttttttagctcagagggaagaagggagaggcttggctgctctcttggcagaatttgggtggggtaggggaggcttgggtgtgggtgcatggagggagaggtggggtggctgttagggataaggccagaatggggcaggaaattagagcctgtgctgtcctgcaccctagtcccagggtctgtagggcttggggagaggtctcaccgatgatgctgatgctgacagcacggctttcctggggcccgtggctggaatgggtggccacacagctgtaggttccctggtcctgaggccctatctcagggaggatcagcacagggctggggggaaggggcaagggcacaccctggtgggggaaggggagaggagactatttcaaaacccttgtctttttgtctccatatcttcagataccctctcttcctcctcagctcctagcctgcctttccctcgttagccctctgccctccctgttgctagttatggttcaccctacctcccagcccctctctccaggtcactcacatccttcatccagtggatttgaggagagggctgggcagggacttcacaggtcagggttacggttccaccaggagctactgctccaccttctggctccaccaccaattggacctcctccagaggcacaggctctgggagttggaagggttttgaggtggagagttacacttgtgagtgatcccagtggccatgggcttgactccctctttccctaagggtcagacttccagaacgtgctcacgtgagcttggggccctccccacctatgctcaccccagacacggggctggatgggggctgtgcgcaaggcccggtgtcggggaaggcctgggctgaagctacaggagaaggtgggacggggatctcctccccgggctggggtcaccattagctccgactgcagtgtgaagagccctgtctcagggtgtctcctggtctgttccttcacagatactcctatgatgggaggataagacaaattatcccagggtgggtgtgggagtgagatcagggagaaggcagcttggggggcaccttaggactcacccttctcattaggcaccaggggcttcccatccaagtgccagctaagagtccctgcagggtagcttccctctgacacacatgtccccacctggggaaagagtggtgacctcagaatcctttgaaaatgagagatgccacacacccacacccacacacactcgcctcctgttcacagggccgttttctacttctcctgctttcttccactaccttattgggaacaccagccgtgagttcagaggcagaatctacaatttctggcttcccaggaatctctgaaggaggaaaaatccagtcagaggctgtaattgtgaaggttctcaaactctgtgtgtggaaatgaggccagtggaagtcagaggccctcatgggccaaggctggggttgaaggctttttcttaggtaagagggaggccttggagaagaccctggaattcttacggtagacacggactcggtagttggacttggtctcctttccattcctgttcattgcctggcaccggaaaatcccctcatcctggatcccgacagccggaaggaagagggagccgttgggaaggacacgagccacactgtcccaggggcctcctccctggggagacaggaccttccaagcttctgtccggcctgtgttctagaagcagagaagcagggcctaaacagtgcaaggcctttgggaaaggactgtgaggcagagtgacggggatccaaatcattgctggtctccctggaagttgggaggctgcaacaggagccccgcttaccagtttccattccagccgctggggtggtttcttgggggcccccttacacttcagcaccagtggctcgccaatccgggctgtgatgttttgagcacctactactgcccctgggagatagcaccatggtagaggggtaggaagggaatgagggctaacaaaatttggacagggtgggtgagggaccttgaaaggcacttcctcgggttctgggaaaagttctaggacgactggggtgtggggttaaagtgctttctgcagggagggtcagtggggttgagggagtggctcaccccacagactgaggaccagcacccaggctccaactgctgttccggctgccatcctgcttccttccagggtcctggctctgtctgcccctctccctgctgtggcctccgccctaggtggggcctgcaccctctctccagcccccatctttcagtcgtcttgtcacagggaatgctaggaattcatgcctttgggacaagagtccttcaggtactagagaaataattatcaccccacccctgggtactaccagcctctgggtacagtcacttccctgggggatggggagtgtaccctctagggtctcattccctcagagcccccgatcctatttattccatcagtccatcagggctgcctggtgacccactggagccccatcttgattgcgcaaagttgcatcaatagggttcaggccagactgttgtctgcaagggtgcaattgggcctgcatcatgaaggcaaggctggggaacaggagagaaacctgtttggaacttcgtgaaagaaaatcattttttttctggggtttctcatgttttttgaaaaaaattctcaactaaacccagggaaaaaagaaatttctttatttaaaactgcattttgttttttttctgtgaaactacacaagtttacaagtgaggagagaactgcccccggcccatgcctcccacccccccacccatcacacttccaacctgtccccagtcctgcccggatctttaatgggaggggttccccactctgacagtcttgtaaaatcctgagaatgtctgaggggatcagatggtagctagttcagggctgaggatgggacagtgttgatgttacttttcccccacatctggctttttgcaacctcctccctctccctaccccttgattttggtgtgacaaaaagatacctcatttatggggaaattgaggaagatacatatacaagcaccccaacccatatttaacatatttggcaataactcccttcccattcttccccctccaattttcaaatagtagttttttaaaaaattaaagacatgtcactcacaggggaagatggcatcttcaatttcctcaaaattactgagtccagccctgcccaagggttgtgggaagaagggggatgagaggccagcagggcaagcccttcactgcctccacatcaaatgcggcagaaacctgcctgcatgaacaaagaacacctaagggattttagggggcaaagcttggtgccctgtaaaatttacttcctgatggacaggcctggagccaggggggcctctttaccagttctgtttgtccccctttctcttaccagaacccctttggctatcacccctaatatgggaaagtaagaaataaaaaaaaaagacaagaaatcaacatatttataaaaaaaaaaacaagctacttccccaaactaaattaaaaattaagaaccaccaccaccaccaccaccaacaacaacaaaaacaacaacaacaacaaaaaaaacagatggatcccagggtttctttttctttctttaaaaaaaaaaaagttcaaccccaaagcccagtcaataattccctaaagtagcagaaactccctccgaggtagatatctgagtcagacactctcgtccaccgagcgattctattggtttaagatgagctgcgtatgaggtaagtaagccgtccggaggggcgggggtggggatgcatgggggcgtggcccatgtcctctgtccagaagtcatgtccccatttttggcatctctgattgggcagggctggcgtctccacagattccagagcatacaagtggggtggggaagggaaagtgggggagcccaggagagaaacagaatagttgcaagtgggagtatgtgtgtgtgaggtgtgggagagggagagagaaagacagaggagaaaaaggggtctgagaaataggtttctcggtatgtgtatgtttctgtgtaagaaagaaagcgagagaggaaaaagatggaaaaaagggagagacagaccccacactccccttagaggccccattcttcctgccatgtaattagcacccccagcacagagagtctcgttagggaggggatgaccccattggcccttctctgtcttgtgcttctcctgtattggggtttgtcctctggaagcctgcgtcctcttcaagtcgccttgtgagagcccccacccctgtgaccctgaggggcaagatcagttggaggtatcagagtgaacactccctggtccctccgttggggatgtcactgaagagggggtcacagcctcttgccagctgccatttgcctgaaaggagagacagagtacagaaaacagagagagccctgggaaccctgtgtgggcacaacattactagggaaaatgcccctctgtcctgtgagaactggacagagaggagcttcaggatccactcaccctcatttcccgtgggctgtacatctggcctcccccgaggttatccccatagccccctggccccatcgagtgtcggagtgattccacctgcaggcagcagaggaaggtatgacagtgaagagaagcctcagaggaaagaggtcttgtatcctaaagtagaggaaatggagttggggaaagccctattcgagaggagatgggcatctgacctgggaagcagaataggaatctccgttgagcccaggcatccccagaaacatgtctccagatcctgagagattgaaagagccgccagagccttgtgggggcagagagggaagagtgtaatagagcccgtgatggtagaggatgaaccacaactctcaactcttgtggggacatgctactatactccaattatccacaaaataacattccaacacacagaaagagcaggctgttccttggccacccgtgggaagaaaggcagaactaagatcactggaatggcctctgtcccctgacatctccagcctatctcagctcggtccctctcaccccaaaaggccccctctctgctatgatcctgcctagataggaagtgggaacaaaagcaggaagtgtgcaaaacagtcagctggggtgacagtgggatccacctgcagaggaagggggtgtcggggagctggtgcggctgtggcccccctgggtgactgacacggcggtcttgacagcatagatgtttgcctcctcttggaactttccgatgtttttcttatagcgaatcctcttgttgccaaaccagttggagacctgtggggcagaaaggagggtcaggtagaaacatttgcctctgaagtccttcactgaataagatgtgagtgacagcattttttttttttttgcttcctggtctcactatgctgttgcccaggctggtctccaattcaagtgatcctcccacttcagcctccctagtagctgggattacaggaacacaccactgcacctagctgagatgcgtgcactttgcctgacaactcctcccgcaacctccataatacctgagacacggtgatgccacacttcttggcaagctcctccttggcctcctcactaggatatgggttactcaggtgggagtagaaatactcatttaggacctcagtggcctgtttgctgaagttacggcgctttcgtctacagaggagggagaagagcggtgaggaggatgttgatgtcctggcagggctgtcacatggcatgaccccagagtcaccattgtcatggagtaccatgttgtgcagcatggcagctcagggtcttggagaggaatgggaaggagcccagtgctgggggccagcctggggtccctgggcccacctggcatccaggaaacgggagcgcaggatcatcacagcctcgcaggtgctctgcttcagctgcatctggatggcgctgaactttcgatggatgatgctcaccatgcgttccatctctttgggggccacgggcctggtgcggctctgctccctcagcaggttcatgacatgggtcgtgaactcattacatgcctgtagtgggggccagtgggctggtgaggaggagccctttgaccatgggattcccctgcaagagcccttccctccacccacccaagcctcctctccttacctgctcatacttctccagctccgagtggtatatgtgacggatctgggcaagtttgctgcgatagtccgagtgttcgatggagttgtcaggggacacaccaccaccagaggctgcagcggctgcagctgctgctgctgagccgccccctttctcgggcccagccacaccctctgccagaagcatgttgtccaagcgcatcagctgtgggtccaccggctcctcctcctgggagctccgaatgctgaggcctagcatgcaggcgagtggacttagggacccagagaccccaatacccagtgctcagtcctcctggtgcttcctggagagccaagttcccaggctttggttccttccccagtccccctgactccttactttcctcagggccccaagttgtcacactctagccctataatgaacagggttctgttcccagagttgagcaatccggggggggcccacataccagttttctccttgatttcacacaggacgctaaagagagcaggcttcattcggtggcagtttagggcgtgtttccttgggaggagtgggagtggggaaagagaaaagttgaggagctagagaaacagagcagggggcctgagaacaaggagggaggagggtcagtctgcggagggaggaagcggattgggggtggaatgagttgggggtggaatgaggagttcttgggaaaagatcagctcccagagcatggggaagctcctcagcttcagggagacacagggaagatgcaggcagcaggttaaaggctgcgggctttgggagatggtctagaaaggtaggaggaggaatctgggagtggatggagaaaggaaagtgacttggtaggtttcagagggagagagacagaagctggggttgagaagagtcagagtttgaggtggcagagtggggctgggggtgccgagctaactggggagatcagtgtagggtgtgtgaaggggtcctggggctgagcaggtgggaggctttgatgcacctagtgtctggctgagcagtggagaggagctttaggggctctggagagggtgtggaggtctccacatctggagagaatgagggggctgggtggagagttaggggagaagataacgtagcccaagaacagtttcttagtctgggagccagagggggctcccggggatggggctgttccaggagactgcaggggtcggcaaaaggttaggagtggggagccgggccaccgggggttccctctgtgaaggtttcagggcctgggggtgaagggaggtttgagagggatcacttttctatgggctcccaggaataaggagagaagagagctgttggatcctggagagggccctggagttggggggggctcccagaagattcagaacatgtgaacggggtttgctgggtctgtgtggggtcccggagtgggggcactcacttggcctgggcctcgtccaggctctggtcggtgatggtcattatctgctgcagaatgtccccgatgtcttgcttccctcggcctcccgggacccccccgctacccccaccggggtctccgccaccgggaggctcgccagggcccccaggctccccactcaccaatcccaggcccccccggcccccgcctggagggggcggccccagtagccgttcgtccatagctgggggggggccctgaggccccctccctgctccgcccctccccccgcctggttacttctccccccaaactcgctggggccgctgctccctccgccccaacccccgcccgtctgcccccggctcccggctcccccgggggttcaccccggcactgaagggagacctgggataccggctgggccccccacaggagaccccggcccccggcggcggagaaaatggagccggagagagagaggaggcccaagcgggggtgtgtgtgagagagagggaggagggaggagggagaaggggggggagcgagggagggaggctgggggaggggagccggagaggaagaggaggggagaagagaggaggaacagggaggagctgggggcggagagagagacacagaaacagaggaactgagacctagtggaggaggggagagggaagaggggatgaggggaggagacgggccatctgaaagatatgggaaagccccctggctggacttccgcggcctaggagtggggctgtgttggcggctgggggcgtctgtcacctgggtcctgaatcagggatctaagcgatgtggactcaggccgctggaatgcctgggttcaccggcagctcagttcgtatttcttgttctaatgactcccctccctgttctacttaattaaaaccgaagaggggggctgggggagataattagggaggtctccagccgctgcttaatgagccagtaattaaccagccggggaggggagctggcctctggccagactggggagagaaaaggcctctggcctcaccttcctacctttcaccccgcctgggccccccagataccagtctgcagtccagaggggaattatatttattcacacaaccaaaacatcagacagactcagcagcagtggggagggagggtgggcagggctgaaggtccattcacagcccgtaaacccctcagtctcagggatcgggggtgctggtagtgggactgggagaatagtcttaatctctcaggtgcccacccaccttcccttcttactgggaggaagggtagagctgtctctcaggttataacctctcaggtggaggcctgagccctcagaccctactgcctagtagcttgacaactggtggtgtccccacaagttagggaaaagactcccagccactccttgagatgggtgcctgggatcccccttactgcctcaagctcccatggacctgtgggcggggagttaaatccctgttccatctcgcctgttcccagagtttgaggactttcaccctgtccagttcccagggaaggtgatgtgggagatgaatattgagatttgtgccgtgtctttcagtctctggtacccctgccaagcaagagttgagggcatgcaatgggctgcccagctttgagaccagtggcaaggaagggctggttggggctcaagtctcagcaggtgtgtgtggggggccgggacctttgctcctccattcgacccccaccctgaactctcagcagcaactccaggagctcttgcccccctggagggaggggaggctctgaccgctgggcttccatccgctggcactggaggagtggagggagagggagagctttggtgagggtctgagaggaggaggttcttgagaggatcaagggttggtatggggaggcatataggaaacctgtgaaggcgatggggtgcctagggagaaacaggagtagagccccaaagagaacaggggccaagagaccaggaggcctgggtttgcctcctggggggatgtcttacctggtgactgaggatagtgctgtaaagctgttctctgtcctcgagaggacggagtggggcaggggctaggcttgaggggttttggggggtgtagaaggtggccctctgctcctccaggcggcgggactgggcttcagccaccaggtccagaaggagttcagtctgcagggagagcagggaggccgagcggggtcccagggctggggagaggggtgtggagggctcagagacccagagaggttggcagacaggagccgtgggggagtgtggacagggtgacgtgattagggactttggatcagaggagagggggtgcaatggggaatcccaaggggagtctggaggaggtggggagagggcccacaatggagtgggccttggtaatggggtcaggatgtgggcactagggtcggggctctccctgggtgggtaggggtacctgtgtggcgggtccctggaggaggaggggatggaggagcagatcgccaaggccgagtggtggagtttggagggggccagccttcctcatcctgaggggggccctgatgccaaaatatgtccattctagtcaagcagtggtggttgaagcgggaggagtggacagggggctaggccagtggcccgtttcctctctgtgtgtctctgttcctgcctcagtttgcccaagcctttcaaggcccctgtgtccctacatttctgccccaggtcctctcacctcccttctttcccagtgtcagcctccccaaccccgtgcccagctcacctgctcaccatcctcttcttcctggggtctctcagcctccatcccctagaggggagaaactggtgggggaggggtggctgggatttgggaggagggctggaaccttgggttcctgaggggagtgggggctggaaggggtgggggtgagctgggggctggatgcctgggtactgagcaggaagctgggttcctggtcagcccccccacgggccccgcccatccctgtcaacttcctccattctcttcccacccaaacagcttgttcagtctctctcgccccagggcagcactgagactgggaaaaactcctccagctgcaggagtggagggggctcatggtggggaaggactcctggcggtctcatctccagagcctcagtagtcccctaatccctggctctgctccctccaccccacctcctcttctgctctttctgtcaacacaggaactagctacacaggaagtggtttcactcctcagaatccccctccccccagccaggtcccttccctccctaagatagaccctggtgtaggatttggccctcccgatcttccctcttacttaccgggactgggaggggcatggttccagtgggaagtggaggattcagatccagggatgtggagctctcaaatatatacataaaaccctagcaccgggtccaacacatagtaagtattcaatatatatgtattgaataatcatccctgacctctaggtatttaaaatctattcaggagatggccggctgcggtggctcacacctgtaatcctagcactttgggaggctgaggcgggtggattgcctgagctcaggagttggagaccagcctggggaacatggtgaaaccccatctttactaaaatacaaaaaattagctgggcgtggccacatgcgcctgtaatcccagctactcaggaggttgaggcaggagaattgcttgaacccgggaggcggaggttgcggtgaactgagattgtgccactgcgctccagcctaggtgacagagcgagactccgtctccaaaataaaataaaataaaaaatacactctattcaggagacaagatgtgtaccaaatagagtacgggaagggttcattttggaaacttacagtttagtgcagacaaggggcaggggaaagtttattttgggcataagagatatagatatggaaaaatgagaggctgaggtaggaagattgcttgagcccaggaggttgtggctgcagtgagccatttgtgccactgcactccaggctgggcaacagagcaataccctgtttcagaaaaagaaagaaatgaaatgaaattgaaaagggagaggactacctctctggcttggtctttgatcaatgctaatcaggctggttggcatcaaggaaggagcagggcagacaaccatttggtacctctaaatggcaacctgtcatgttagggagtttatagctgagtgatttggaatgtgaaatgtgatgaagagatctggtcctgccgcttattccttgcaatcttgggcagatctctgtgcctcaatttctgagtgaaatagggttttaatagcacctacttcatagggttgatgtattaataatgtaataaagcacttgatgcatagtgaatacttaataaactgtagatattattggctttcaaaatgcctcatgactccatgtttcaaacctagcaacatattgctgcaaggtggacaaagtttcaagatactctctccatctacttgacttgtggccttaggaatctcctaagtggccataagtaaaagccctaggatgagggacaaagtgtgtgcatcatctagtgcagtggtctcctacctttttggcaccagggaagagtttcgtggaagacaattattccatggtcggtggcgacggagggctggtttcaggatgaaactgttccaccccagatcattaggcattagattcccgtaagaagcgagaaacttagatcccttgcatgcacagttcacaatagggttcgagttcctatgagaatttaatgcttatgctgatctgacaggaggtggagcttgggcagtaatgcttgctcacctcctgctgtgtggcccagttcctaagaggccatggaccagtaccagtctgtggcccaagggttggggacccctgacctagtgtgtgcggtttctcccttggctactagattcttgctttcagataataccctaaattatcatagggcccctaaatatacttattcttgcttttaaactatacttacatcctccatccaatccaaatgctgagccaaaagcacaaaatgctgacattatgcagtcactcccatcttttttcccattcttctccccaattcctccaaaaaaaggtaacacttcaaatcagctttattatgggtgacagatttagggttcttaaatagcgatagcagtggctagaagaagcgcttcatccccacagtggagttctttgttgtgaggggagggaatgcaaggagtcatcagcgggggtggcccttggccacttttcagcacctacacagtgcctggcacatagtaggtgcccaataaatatttgtcagccatttgtgggcagtggggacaatggatcataggggcaccctttggaaaccatatataggaaagaacatcttacatcccatatgcctgcaattcttggttccaacttaggggtatttccactccactctgccctcctgtggcctgtcttattttctggaggaggactgggcctgcctcatcctagcatcttaaaccctctttccagagctgcagcttctccacgtggaagatgtctgctctggtgggcatacattcattttaggagagaaactaaactcacaacccttcattttgggggatccatcttaaaaccaggaaggccttccagcctgccttttaatgggtaatcatttttggaattcctccctaccatgtattcttctattttttaccctctcctccttggtttatgggcatttcttggagggctgggggaccacagtcaagttgaggtgatccccgctccggggacggagtaaggcaaggaggcgggatcggaatgttggaggcagaaccgcaagctcccagggccacccaatcacagggccagtcatccgttgagaccctgcctccgcgcccggcagccactccgtatcttcctcgcattatcgcagggttgggccgaggcccgcgcatgcctgcagaaaacctacggccgcgaggggtcgggcctcctcctgctcctactcccgagaggctccggcaatgagaataggccccgcccccccgcgcagccaagtctacggaccaagtccgagcctgcagacaagctccgcccccacgagggcctgctccggctgacagcgtccggcagcgcggcagagccccgcccccatgcgggggcacgcttactgacaccgtccgtgcgcgcgggaagggcccagcctcgcggcccggcgtggctttgtgacgggcctctggtggcccagccccttccagcagcgtcagcagatcccagtggttacgttggtgagcgacgtccgccggcgctagcccagcctggtcccgcagctctcgggctgcccccagccccagcagtagctgggctacttccaccgctccttcccgcgccgccaggaatagcggcgtctgctcctgtacagaagagccagggccgatatcagggaaggccacgcccacaggactgggcctttctgccttcacttgcgcgaccactggcccctatcccttcaggctttgcgggttaccgcactttccatctctcgtgcgcctgactgttttgtgggaagccctctgtcccatctaaccctgttgtcctgggcatctttatcggctccggcctggagaagcgagcgggcggctcgggcgttgttcacggcagcagcccagtgcagcgcagttttccctaggggacgacgtgggaggttgttaccccagttgggggccagacgcctgggttccggtttcccacgggttctggccttgggggaagggctattcgggccggctggtccctcaaaggcgggaagcgttgcccaggagaccaccggcctgcaggaagtgttgccctggtgacgtcaccagtgcgcgggagggacaatggggcattgttctggggtcggtgagaccgggagacagtctccccccacgagattcccccccctttccacagacactgtgttccatgccagttccccagtaagctggagcggagggccagtgtggtgttgagggtgggagttggggggggaaactcacgcggcccgtacttccaccgcatctcagattgaccgccgtaacagcaggatgagagggaatgcccctctgctgcacctatattttgcacgctatctcccaccccatctgctcaacttctctatagcatacatcaccccttcctctacataccccatttatctctggcccccacgtctgcttgggctgcaatcagttcttcaaccaggtcttccaccgccagcctggcagccagcatcaagggtgtggtcccgtcctctgtgcgagcgtccactgcagtttgtctgctacggagcagaagctggggagacagagggccagtgacccctggggtaccttggactgccaactcgagttccttacactattaaccccactcgcaatccatattcagccatcctccgcagtttccctgtcaggttcccaatcacaccaatttcctccttgtcaaactctaggggatgcttctgtccagctttacttgtaagctcgccccattccctgtagggacctcagtgtgtgctaacctggcagacctcccgagcatcagcagccacagcagcatgaaggggtgtgcgccctgcccggtctggctggttggggttggctccagcctcaaggaggcggcgggcagcggttggccgggagaatcgggcagccaggtgcaggggggtctccccagtgcccacggtgtgagcctggggacaggcccctccatccagcagaggttcccagggctcaggacatcccaaccatgccccttggaaggtcccggactgtacttccccacagcaaactgctgacatcaggggtgtcaccccatctgttggtaagacagagtaatgggtcaatctaaaggacacaacaagggggaagggacaacatgtaagctcagagagaatcaaaacctgaggtgttgggaagctaagttctggctctgtgtggctttagccaagtgacttttctgcttttctctgacttcagtttcttcctctgtaaaaggaacctgcagcttaattctctgacattccagggcagtggttttctcttttttttttttttttttctgagacggagtctcgccctgtcacccaggctggagtgcagtggcgcgatctcggctcactgcaagctcctcctcccaggttcacgccattctcctgccttagcctccagagcagctgggactacaggctcccgccaccacgcccggctaattttttgtatttttagtagagacggggtttcactgtgttagccaggatggtctcgatctcctgaccttgtgatccacccgccttggcctcccaaagtgctgggattacaggcgtgagccaccacgcccggcctagcagtggttttctcaaacgagtctggatcagattcacctgaagggcttgttaaaacagattgcctaacattttaaattcctgagtcagtagctctgtagtggagcccaataatttgcatttctgacaaattcccaggtgatgctgattttgctgtctgaggaccacactttgagaatcattgttctaaggcactcagtctaaaattatttcctctagttctgatattaaaggactctctgattctaatagggtcaaaggactttttttttttttcttggtctgggttgactcacataccaggtccacgggtgtccaggtcaggggcttccatctcagattcctggggaggagttagcatggctgcctgagggagcgccccacagccaccactcagagaccagagctggcacgtggagggtgggcctgtttcttcagcctttgggtaacagcaaggatcagtgaaggttgatttgccctttcatcccttccatcacctccagaccattcttgccccagccctttcacctggcccacctcctctccctcctcagggcctgagcacatcacaactccatcctcatcaacttctgcctttggcttcagtgccctggaaaggaatgggtgggtagaggttacacggaattatgaccatcagggtctccaaaatttccagcaggcttcccacccctctctccttcccctatctttgacttctgcaatagtatttcttatcttttctgattgtaaatatcgccataggagagactccccttcctgagcctgggtttctcctcattctcacttgagaccaatgctgtcctcgcctagtgggggccggcgtcggtggggagctgactgagtccgaggccgtcgagtgaaaccagggggcagccagagagctccatgctctcggcgtcgacgccggatgagctggaggacgagaagagcccctagggccaggagaatcaccccggccactggggagcacagcacaggccagggaagctggttggcagggggtgctggtgggagagacagagtcacaaagagaggccactcctggtgagactgattactattgggagacctttggacaagtttagtagcctgtctttgcctcggtttccttatctgcaaaatggggatgataatatagattgaggttgggcacagtggctcatgcctgtaatcccagcactttgggaagctgaggcaggtggatcatatgaggccaggagttcgagaccagcctggccaacatggcaaaaccccctctctactaaaaatataaaaattagtggctgggtgtagtggcttactcctataatctcagcactttgggaggctgaggcaggtggatcatgaggtcaggagatcgagaccatcctggctaacatggtgaaaccctgtctctactaaaaatacaaaaaattagccaggtgtggtggcgggcacctgtagtcccagctacttgggaggctgaggcaggagaatggcgtgaacttgggaggtggagcttgcagtgagccgagatcgcgccactgcactccggcctgggcgacaaggcaagactctgtctcaaacaaaacaaaacaaaacaaaaacaaaaaaaattatcagggcatggtggcatgccattgtaattccagctactcagtagtctgaagcaagagaattgcttaaacccaggaggcagaggttgcagtgagctgagatggcgtcactgtactccagtgtggctgacagagtaagactgtctcagaaaacaaacacacaaaaaaaggctgagtatccataaccccaatcccaaatctgaaatgttccaaagtctgaaacttttagagtaccaacataacgctcaaaggaaatgctcattgtagcatttggatgttgtattagggatgctgaaccagtaagtataatgcaaatattccaaaataaatccgaaatctgaaacacttttgttcccaagcatttcagataagggatactcaaccagcagtacgtgcctcatggggttgtgggggaggattaaatgaggtaacaatgtaaaatgcttagagtaaggcacaaagtacgatatagcagttatttttctttttttttttttgagatggagtctccctctgtcgcccaggctggagtgcagtggcgcgatctcggctcactgcaagctccacctcccaggttcacgccattctcctgcctcagcctcctgagtagctgagactacaagcacccgccaccacagccggctaatttttttatttttagtagagacagggtttcaccgcattagccaggatggtctcaatctcctgacctcgtgatccacctgccttggtctcccaacgtgctgggattataggcatgagccactgcgcccagcctattattctttcatgtactatgaattgtctgatacaaagactattaggtattctcagtctggtagagaagataaaccatccctttgttggagggctatgacagaggttaggataatgtgcttagggaaataaggaaggagactgtagaacaaatgggccagtgggagattcagttagagaaagcggggttagggaaagtaagtccccacaaagaacattttcagtctcagctgtcctgtttgattcagcctccattgcctgttgctagcatgagagctggcctgggaacagaggtcagagaaagtggcaaggggtcacctaccggtccctgcatgagggtggacagccagcagtggtccaggcagcaggggctccagggctcccactgcagccatcgcagcaaggaagcggagtagaagcccagggtcccagggacagcgggatgccgggtggtcagggccacagcgggacaaatccacacccatgaccaccacaaacctgtagaggaggcacctcagagacctctgtattggtccctggctccctttcctccctctgccctcttaaaaaaactggtgtctggcccttccctccacctagcttcttacccagcactgagggagtcggtctccttgcccaggggctgtgtttgaggggctgctctctcctgataggtggggtcccgagttcctcctagcttttcttcagcccgggccccaggataggggtacaccatgtccctgccatcacgatccttccttacccagagtcctaccctcagagtcagggacagcacccgggccagggcaaacagctgctggtctagggctggggggctcagtaccaccagcagggccagggagggcccccactctgggtccccatcttcaggcctgcagtcacctccatcccagccacactctgcagtgttgcagcctttctcacagtgcccgttgtggaagtgatcatggcagtactggtcataggctggactgtggggtaaggagagggggactcaggacctccctaaaacctgactcttttcttcaccctagaaagaattccccatattttgtgccctctagggctttggttgctaagtgggggcagctgtggagcaatgagcttagtcaagtcctggatggtagtccagacaccccaatgtctgctaacacccctgtctccctagactgtcccctctctgtaccctcccaagctctcctctgtttctaaaggagagtcccaggcccttttccctctgtgaggtgctgactgctaggggaaatactccatggcagcaaggcttagggaaggaggcttgagacctgagttccttcaactcttagagaggagcccaaaggccacgccccacattaaatactgatgccaccccattaccctaggttggagtccagagtcttcgacccctgtttagtgatggttattagggtggaaactccctggagcccaaggctgtggccacactgtaactcagagccatctacgtccttcctcctcctctcacccacccctctccttccctggctccagtggatttcaggctcacgtgcaggctggaggggtctcacagtcgtagccatcaaacagacactcttcagagtcacactgtgggtggcactgcccgtcccggaagagaagccagcaccgagagtgggaggggcagcccttccaggggtctgggactcccagagagcagtcccctccatcccagtttcctcccgggccactgcagccagcatcgcaggccccatctccacttctgccctcacaccccttggctccgggtttctgacaccggggccctggagagctgtgagggcaggagcatcgaaagcctgggccccccaagcccgtggtctctgagcagctgccattgtataggcatggggagggagggccacagcctttaggagctggtggggtcaggcagtcaggacccccatagccactgaggcaggcacagcgtggtgggaagcctggcttaggggagggcagacacaggcctccgtggtggcagtgatggaagccgcaggaaggggccctgtggctgcaggtggggccttcaaaaccctgtggaggggaggggagatattggagatgcaacttgcattattcttcccgctctccatcaagcaaactcttgggttaagacggtgcagagggtcctagattctcatatctaaaaggcgcctcagagagcatcaagttaatcattttgtggatgttgaaaccatgtcctgtggtaatttcacacaatgacatattacattctgttgaaaatggatgaagcacagctgtgtgcaacaacctgatggactgtggcattacagtgcaagtcctagaagactaaacagttaatagaatgctattatattattattattattatttttgagacagagtttcgctcttgttgtccaggctggagtgcaatggtgcaatctcagctcattgcaacctctgcctcccgggttcaagcaattctcctgcctcagccttcccaatagctgggattacagccatgcaccaccacgcccagctaatttgtatttttagtagagacagggtttctccatgtttgtcaggctggtctcgaatgcccgacctcaggtgatccgcctgcctcggcctcccaaagtgctgggattacaggcgtgagccactgtgcccggccggctgttatattattatcttactccttagaaataggatcatatgtcttcctcttcctctggagagggaacaggatacaggaggaggacttaagtagatgtaagttattattaatattgaaattcttgggttaggttcatgggtgttacattgttagaataataaaataaaagaagaccaggcataaaccaatgtcagtgtatcaggaaccaaagcttaagattagtctaattccatgcatctgaggtccataaatacatatacaaacacacacagagttaaaataacctatctgaggccacccaccacgcagcttgagcttggggagctcctgaccttcccttaggcaacgcctgtgatttttgaaaattccattcatgctatcaactgatcctgccttgcctttgactgcttctgagagacacttcccactgtgagcttggcatggctttttccaataatttccacatcagtgctcacccacagtcccttctgggattccaactgaggtattcttgccttgtcagcatagggggcaacagagaaggcagatttgtggtcacttgccttggggcagtggcagatgaaacccaggggtgatcctgctgtggcctcacaggtccctccatgaaagcagggttggctgtggcaggggtctatctccacctcacaccactggcctgtaattatgggggagattagatgtcacacactgcatcagtcactgcctccatcctagctcattcctggatgttggcccagtgctagatgtgcaggtgaagggatcctggggcatcttttctgggcgggggtgggcgtggaggcaggggatggaccaggtgacggctgccgcatgggtggagactatctggctctccatggtctgcttggctgtgctccagacacacttgtgccccttgtcttggggcctcacctgtgtgtccaggcagacactggcagtagaaggcattggccagagagtggcaggctgcagtgcctgtggggtggcagggctggtccagacactcgtccacgtctccctcacagcgtagccccacaaagcctggagggcaggcacagtggaagcctccaggtttgggagtacaggttccatggttgtgacagggttgggactgacaagcatcgagttcctttgagcagttctgtccatcgtagcctggggcacactgcagacaaagaggattagacagggaaccagtggatgagcccaacccagcactacaagggacccagctcaagatagtctgtccagtcccccaccttccagctcaacagcatcactcaactcaccatccatcatggccatgtgtcacaatccttctatctcaactccccatgagacacaattgttggcgacacacaactcaaacttccccagtcccaaacaatctctatgacacactgccaccaaacacagcaccatttttggtaaaaccttcctcccctgctaaatacctaccaggctctctcatactttattaattcataagcatctattgagtgcctactttgtgtcaggcaccgttttaggcactaggaatacaaagaaagttagaacccattcctatttcctggaagctctcagtcaaccagaggaaagaaatgactagcatttattgcatgatttatatacataacctaaaaatccccctaatgacattttatttgggttatctcattcgatttttactttgcacgtaaggaagctgagtctctgaaaggttagtgacttgtgcaagtcaaatagctataggtggcagagctgggaatcaatgaaggtctgtgactccaaaccaatgctcttaaccattttctgcttcttcatgccactcagctagtgagagaagggtcattggcaagatctgtaccacgtgctggcttcttgcaagaggaaagagagtgtgcaagagtacagtaccaggaaggcaggcttcaaagagagaaaagggaattcacagagaatccaaggagtggtcagagagctggaaggaacaggtgatgggggtgttttggaggagggagcttcataaaagaagaagtaaatagccgggtgcggtggctcacgcctgtaatcccagcactttggtaggctgaggtgggcagatcacgaggtcaggagttcgagaccagcctggccaatatggtgaaactccatctctactataaatacaaaaattagccgggcatggtggcatgtccctgtagtcccagctactcaggaggctgaggcaggagaatcgcttgaacccgggaggcggaggttgcagtgaaccgagatcgcgccactgtactctagccggggcaacagagtgagatgctgtctcaaaaaaaaaaaaaaaaaaaaaaaaaaagaataagtaaagctgagtaatgggtgcccagaggtttactactgatcagtatactgcttttgtttatgtttgaaaatgttcataataaaaggttaaaaaataaaataaaaaagtgaaaaaagagggtaggttagggtatctgtcttgagccttctatcaaaagttgtggttctggccgggcacggtggctcacgcctgtaatcccagcagtttgggaggtcaaggcgggtggatcacttgaggtcaggattttgagaccagcctggccaacatggtgaaaccccatctctactaaaaatacacacatacacaaaattagctaggtgtggtggcaggcacctgtaatcccagctactggggaggctgaggcaggtgaattgcttgagcccgggaggtagaggttgcagtgagctgagattgcaccactacattccagcctgagtgacagagcaagactctgtctcaaaaaaaaaaagctgtggttctatatctcaaaataataaaagccatatatgacaaacccacagctaacatcatattgaatggggaaaagttgaaagcctttcctctaagatctggaacaagacaaggatgctcactttcactatttttattcaaggtaatactggaagtcctggccagagcaattaggcaggagaaagaaataaagggcatccaaattgcaaaagaagaactcaaattatccatgttcacagatgacataatcctatatttagaaaaacctaaagaaaacactggttataaacaaattcagtaaagctgtaggatacaaaatcaatgtagaaaaagtagtagcatttctatacgctaacagcaaacaatcagaaaaagaaatcaagaaagcaatcccatttataatagttacaaaaaataaaaacaaatgaataaatttaaccaaagaagtgaaagagtactgcaatgacagctataaaacattgatgaaataaattgaagaggacacaaaaaaatggaaagatatcctgtgttcatggattggaagaatgaatactgctaaaatgtctgtgcttaccaaagtgatctacagagtcatgcaacccctatgaaaataccaataatattctttacagaaatagaaaaaacaaccctaaaatttatctgaactgtaaaagacccaaatagccaaagcagtcctgagcaaaaagaacaaagctagaggtaccacactacctaacttaaaaatatactataaagctatagtaaccaaaacagcatggtgctggcataaaaaacagacacatagaccaatggaatgtaatagagagcccagaaaaacaagtccaaacatttaacagccaacttactttcttttttcttttctttcctttttttttttttgagatggagtcttgctctgttgccaggccggagtgcaatggcacgatctggctcactgcaacctccacctcctgggttcaagcgattctcctgcctcagcctcctgagtagctgggattacaggtgcgcaccaccatgcctggctaatttttgtatttttagtagagacgggggtttcactatgttggtcaggctggtctcgaactcctgaccttgtgatctgcccacctcggtctcccaaaatgctgggattacaggcatgagccaccactcccggccagccaacttactttcaacaaaggcaccaagtacacacactggggaaaggacactctcttcaataaattgtgctgggaaaactggatatccatatgcagaagaaactaaacctaggccgggcggggtggctcacgcctgtaatcccagcactttgggaggcggaggtgggtggatcacctgaggtcaggagtttgaaaccagcctgaccaatatggtgaaaccccatctctactaaaattacaaaaattagccgggcgtagtggtgtgcacctgtagttccagctactcaggaggctgaggcaggagaatcagttgaacttgggaggtggaggttgcagtgagctgagatcataccactgcactccagactgggcaacagggcaacagagcaagactctatccccccccccaaaaaaaaagaaaaaaagaaactaaatctctatctgtcatcatatacaaaatagattaaagccttacatgtacagctggaaacttgaagccactaaaaaaaaaattcagccgggcacggtgggtcacacctgtaatcctcaaacacaaggtcaggagtttgagaccagcctggccaacatggtgaaaccccgtctctactaaaaatacaaaaaaatagctgggcgtggtggtgggcacctgtaaattccagctatttgggaggctaaggcaggagaatcgcttgaacccaggaggcaaaggttgcagtgagtcaaatttgcgccactgcactccagcccaggcgacggtgcaagactccttctcaaaaaaaaaaaaaaaaaaaatcatttgggaaatgcttcaagacattggtctgggcaaaagttttttgggtaagacctcaacagccaggcaacaaaggcaacaacagacaaatgtgattacatcaagctaaaaagtgtctgtgcagcaaaggaaacaattaatggagtgaagaggcaacctacagaatagaagaaaatatttgcaaactgtctgacaagggattaataatcagaacgtataaggaactcaacagcaaacaccaccactaccaccaccgacaaataatgtggtttaaaaaatgagcaaattatctgaacagacatttctcaaaagaagacatacaaatggccaacaggtatatggatgcaaatcagggaaatgtaaatcaaaaccacaatgagatatcatctcacaccagttaaagtggctattattgaaaacacaagggccaagtgtggtggcccatgcctgtaatcccagcactttcagaggttgaggcgggaagatcatttgaggtcaggagttcgagaccatcctggccaacatggtgaaaccccatctctactaaaaatacaaaaaattagccaagcatggtggtccacgcctgtgatcccagttacttgggaggctgaagtacaagaatcgcttgaatctgggaggcagaggttgcagtgagctgagatcaagtcactgtgatccagcctgggcaacacagcaagactctgtctcagaaaaggaaaaaaaatgcaaaaaatagcagatgctggcaaggatgcagagaaaggggaaccctcatacactgttggtgggaatgtaaactaacacagccagtatggagaaaagtatggaagtttctcaaaaattaaaaatagatctaccatgtgatcaatctactgttcattacatatccaaaggaaatcagtatcttgaagagatatctgcatccccatatttattgcagcactgttcacaatagctaacatatggaattaactgaagtgccatcaacaaatgaatggaaaaaagaaactgtgtcatatagacacaatggaatattattcagccagaaaaagaatgaaatcctatcattttcagcaacatggatgaaactgaaggacattatgttaagtgaaataagccaggcacggaaagacaaatattgcatgtctctcaccttcacctttgtgccactgccttagttagtcctgacctttcttgcattccaggtagatacttgcatcagcctcctattgcatgtgtaatattgctcctcactcatatgtgggagctaaaaaagttagtctcatggaagtagggtagaatgatggttaccagaggttagaaagggtggcagggagggggagatgaagagaggttggttaatggatacaaaattatggtcatatagaaggaataagttctagtgttagatagcagagaaggatggtgatagttaacaatttgtatttcaaaataactagaagagaagatttgaaatgttctcaacacaaagaaatgatgtttgagatgatagatatcccaattaccctgatttgatcatgatacattgtatgcatgtatcaaaatatcacatgtgtccaggtgcggtggctcatacctgtaatcttatcactttggcaggctgagcgggtggatcactttaggtcaggagttctgagaccagcctgcccaacatggtgaaaccccatctctactaaaaatacaaaaattagccaggcgtggtggcgcgttcctgtaatcccagctactcgggaggctgagacatgagaactgcttgaacctgggaggcgggggtttcagtgagccaagattatgccactgcccttcagcctgggggatagagcgactctgtctccaaaaacgagagagaaaaaaaaaaagaaaccaaaaaactcacatgtaccccatagatacgtatgactaccgtttgtcaataacaaaagaaaataaaatggcaaccacacacacaaaaaagttgtggttctgagcatatgaatcaggctgcttagacttgaatgccagctttgcctctcctggcttagtgacctggaccacaaagaagaggccctaatccagcctggggagaagttagggacatcttcctgaagaagatgcctcctgaacaccagcctgtggaagaggggttgggaaggccattccaggtagtgtcaatagcagggataaaggctgagaggcaagaatcagtatggggtacgtggcaaagtcagcagcagtttcatgttgctggagcagagagtagaagggtgggatggggagagctgaggcctgagaggcaggcagggctgggtcatgcaggccttggactttattcagaatgaggcgggcagcctccgaaggttcagcaggggagagacaggtcaactggacattttcagtagagtaccctggccacggggtaaaggctgaacctatagaaggacaagtgtggaggcagagactgtagttaggaggctgatgcaagtatctatctggaacgcaacaaaggtcaggactcaggcagtgggacaaagggtgaaggtgaaagcacagacttgagaaaacttcaggagataaagtggcatgactttgtggttagttgggtgtgtggggttaaaaaaaataaaaggaggtgaaatggatacattgggtcttccctcagtcactactgtctctcccatccagcccacccttgtctttcctcccccttctcctgcagaccctctcacctggcagagatacccactgggctgggccatgcaggtggccccgttctggcaaggcctggactcacatgggttcacgtgatcctggcacaggctgccttggaatccaggggggcagtggcagaaataggaggggccgctgtcgacacagaggcctccattgtggcaaagggaagagacgtctatgcctggggagagagacaaacagggatatacaaagataagtggggggccgggcgccatggcttacgcctgtaatcccagcactttgggaggccgaggcaggtggatcaccaggttaggagtgtgagaccagcctggcaaacatggggaaaccccgtctctactaaaaatacaaaaaattggtcgggcgttgtggcaggcacctgtaatcccagctacttgggaggctgaggcaggagaatcacttgaacctgggcagcgcaggttgtagtgagccaaaatcgtgccattgcactccagcctgggctatagggcaagactccatctcaaacaaacaaacaaacaaacaaacaaacagaaacggtaaatggggatgtggccgggcgtggtggctcacacctgtaattccagcactttgggaggctgagacgggtggatcactgaggttaggagttcgagaccagtctggccaacataatgaaaccccatctctactaaaaatacaaaaaaaaaaaaaattagctgggcatggtggcacacgaatcccagctacttgggaagctgaggcaggagaatcacttgaacctaggaggtgaaggttgcagtgagccgagatcgtgccactgcactccaccctgggtgacagactgggactccatctcaaaaataaataaataaataaataaataaataaataaataaataaataaataaggtatgtgaggaggaggaagggtgtattcagggcccaatctctgggtgtagaggcctttaccttggggaccactaacattcctgggtggagactggtctgggcccaaggagttaataactcctggcactgaagaaattagaccatcgagttttacctctctcctcaccctttctgccagaatattggagacatacccctaaagcttatcataatgttaaagcaactgttttcttggcttaaagcaaggcttgagcaagaaataattcaaggtatgcctcaagtgaggacaagtggcttaagtctgtcccctgagttctgcattcctttaatgttctctccctgtgattcccatcagctatcccttaactccatcataatctctttcccgagctcttctcatatcaaaccttattttagtgttcttttacaaagagggtggcgtgacatcgaagtgagtggggtggggtgaaatgcgttgagtgtagctggattaagtgtggtccactctgcctgggttatgatgatcaggacagagttgagttgctccacgttgagtcatgtccctcatggttgggttaaactggaatcctgtggaatgggctggttggtgttgcttgaattgcgttaaatgaggtaacaggaattgtgttaggcttctctgattgcacaattcaacacctctgcaatcaagaactgatttgtctgtgtggttttgattctcaggtggttgttttggccaaaagctgtgtggaagcccacaggaacggggcaggtgagaacacccatattttcttcatttgctctccagtcagtgccggtgttggttaccttggctcagtgcagccttctggcaggaggacagtggaaggttgcagagaggcccggtccatccctggaggcacaagcagtggaaggagggcccagtctggaggcagtgggaattgcgtgggcagggcttctgggcacataagtccatcagagtctgaggggtgggagggagcgtgaggcaggacatagcatcagattctcagcccagagatggtcctctgcccactccagctcctcgaaatcccttacttcaaaaaccttctcctgaatggcctgggaccaggtgaccctccctggtttccctcccagccacttccctcctcagcacgcctgacttcaatggccctcacctggcagctgcctccggtgtagccagtggggcagaggcagcggggaccctgagggctgtcctggcaggttgccctattcctacaggggctgaacaagacagagacagggcatgataggaagaagttcgggcaacaaggggaaggtagtgtgtgatattgtcgggaggcaaccacagggaggtggcaagccaggagggaaggcggaacgaggtgtggggtgggaggcagcctggaacccagggggagatgagaggaggggtgggaaggctgaggggttttctcccttctaggggtctttgggccctgctcacctgtctgcacagctggggcggagctttccctcacagcgcgggccctggaagcccatggcacagaggcaggagaaggtgccaggcctgttcacacaggtacccccattgaagcacggggctggagagaggaggctgtgagggtttgggttccttgcctgtaacctggcctgtgacctcagtcacactgtacataggacatacaccccccacccccatcaaaacgacagctcactgccatccaattaatttttatttatatgatattttattatttttagatagggtcttgctctgttacccaggcagtggtgccatcagagctcactgcagtcttaaccttctgggctcaagtcatcctcccaccttagcctcccaagtatttgagactacaggccttagccactgtgtgcccagctaatttagagatggagtttcattatgtttcccaggctggtctgttcaattaaattttaaaaaatatgacacaagcataccctccttagttcttccattctcctgtggaccccagccccatgacacagtgggcactcaccagacacacagtagtcagtgctggtttggcactggggccctgtgtggcttggagggcaggtgcagtagtagcctccagggctagggttgcaggagccgccattgagacatggccctgagtgacaagctgtcatctcctcactacaggtgggtcctgaaggaaacaggtgggggctgagaaagggtgtcctccttccctccctccgctctccttctctttcctcttccttcccttcctcatccccaaccctattattctttcccatcaacctccgttctcaccacctcccacacatcacccgtgtcccctgcagtccagttctccttagtggtgactgagactcagggcccgtggtcgcctgccttacccttgacatagggggtgaccagcacagggtgtatatggtttagggagggtctcacctgtgtagcctgtagggcaggtgcagttgtagccagagggctgggggtagcaggtccccccatgggcacagggtgcagagatgcagccccctagctctgcctcacactctggccccgtccaacccacgtcacacacacatgaggatctggttgtaaagagaaaggggagggtttttctcttctcctactgcttatgttcccctccctgctgcctggacccctatgacttcctcttcttttggccctgagattctggcctctttcttcagtgactttgctctcagcaccgcccccatcctccccaacacctgctcattttctccaactagatatatgcatctatatatctagttggagatatatatatatatatatatatatatatatatatatatatatatacacacacatatatattctttctgtaacttacttattttctgtctttctttagaatgaaagctctacgagagcagttgctttatctcttttgctttgtgtttcccccagggcctggaacagtagccacacaaagtaggtgctcagcagatttttttttttttgagacggagtcttgctctgtcacccaggctggagtgcagtggcatgatcttggctgactgcaacctccgcctcttgggttcaagtgatccttccgcttcagcctcccaagtagctgggattacaggtgcgccaccatgcccagctaatttttgcatttttagtagctacagggtttcaccatgttggccaggctgatgttgaactgctgatctcaggtgatccgcccacctcggcctcccaaagtgctgggattaccggcatgagaccgtaatcagcactgcgcctggcctcagcagatatttttctaatgaatgattaattcgccctgggatttaatgctcttctttctgctctgaccccctggtcctctgtttccaccagtttttgtggactctcttctccttggataacacttaccagttgagccctcccactgccttgccctaagaactttgccatctccttccttttccccattggtcatttctcacagacctacatctcactggctgtcttctcctgtcctagcgaagggagcccaaaggagggggcagatggggagggtctggaagatgttacctctggcagtgcccgtggtggcaggtgcagttgtcctcaggtggggcacagccagggcttccatcaggacagaggcagttggccttgtctttctggtccttacatatctgcttgggctggcacaggttgggagcacacaggggaacctcacagagctggcctggggtgggaagatgggtcaaaaagaaaacagctcctccacatccttcattgggccaaagccacatccttcattgggccaaagccacttcttatgcttgccttactcactccctatgaacccatgaacctgtccttcaatgggtccctattgcctttaagatattgtttaactttctcagaatgatatgcagagtcctgcaggacatgacatttgtacaacagctgtgtttctcatctttgccttgctgtacccttaactctgactttcttacagttccttaaatggggtgggcttttcttccatctgtgtctttgcacatgcagttatctccagctaaaacacactatctggcactctatttagacagactcctgaccatccatctttctatctttctctctttcctcatttcctcctttccttcccttctctccttccttccttccttctttccttccttccttccttcttttttttttgagatggaatcttgctctgtcacccaggctggagtgcagtggagtgatctcggctcactgcaaccactgcttcccaggttcaagcgattctcttgcctcagcctccccaatagctgggattgcaggcgcccgccaccacgcctggctaatttttgtatttttgtattttttgaggtggagtcttactctgccacccaggctggagtgcagtggcgtgatctcagctcactgcaagctccgcctcccgggttcacgccattctcctgcctcagcctctggagtagctgggactataggcgcccgccaccacgcccagttatttttttgtatttttagttgagatggggtttcaccgtgttagccaggatagtgttgatctcctgacctcatgatccacccgcctcggcctcccaaagtgtaatttttgtatttttaatagagacgaggtttcaccatgttggccaggctgatctcgaactcctaatctcaggtgatccacccgcctcggcttcccgaagtgctgggactataggcgtgagccaccacgcccagcctctgcttatctttcaagactcatctcagccatcacctcctccatttttagtctgggttggctggtcctctgtgctcttgtaatatcctgcacgtttttctctcagagcacctctgtgggctatgatcaacaggagacttgctggtctctctgtattagacttaaagtcacatgaagatggcaactgtcttactcagatttgcctccgtatctggcatagtaggcgttggtaagtgcttgctaaataagcaagtgaatgccttttctttgagccccgtcctctgctcccaagccgcaatcacaccatttacactgggcccatgtgggccctacggtaacccctgcccttgtccccatggttgtacaattatgcaggttttacactaaataactttaaaggataccattctcattctattctcacatcccaaccatcaaacacccaccaatgaactctgccccaacccaaatggaataaaatattctgccagttctttccaatgcctcccctgtgaacctgtgaaaccagaggggcagaggcaaaagaaggctcctggaagatcaaggcagctggctccaacgggacatgggtcactcaggcactcatccacctctgtttgacagcgtggcccttcaaagcctgtggcacagcaggaaggtcagggacctgcacggatgtctgcctcctgctcccgctgtcccccacagtgtgtgccccagtttacctgggagacacttgcagtggaaggctccaggctggtcctggcactgcccaccattggcacagggagagcttctgcactcatcgatatcctcctcacatcgggtgccggagaatcctggtggggcggaagtgggtggggagaggaggccaaggtcatcgagggaggcacagcatggcgccttcccttgccaggaaaggtgaacttgcagagcttcccagagaagacacctggggcaggtgagcgtggggtgacaggagatgatgcagaaaaggtgaagctcagccacctgccagctgtgtgactttgggcaagctggtcaaccctctaggccccagtttcctgttctgtgtaaaaggggaataataatggaacctacctcatggtactgttaaaaagattaaatgacataacgcctgaaaagtactcagccaaatggctagcctggagtaagtggtgaataagtgtagttattataatagcaggggacagaggagtgtccggtgaggctggagaagaaaggcttggggcagcttttgctgggtttatgatgagagtgccaagaccagcctgggacctcaacatgcatacacagaggctgtgcaggaggactggaaaggagggatctttgggtgatttggtaggacagagatgagaatgggcaagtaagcaagggaagatttggggatgtaagagtagagattttggggagcaaagacagatttggaggactccttggcttggctagagagagcttcaagtggccttgggtgattgctgagcctgaactctgcaggttcagaggcctggggtctgagggtggccagagaggcatctgtactcaccaggcaggcagatgcactggaagccgttgagcaggtcatggcaatccgcgtggttcaggcagggagctgaggcacactcgttggtctccacctcacagagctgcccttctaagcctggggacatggggaccatgagggctgtggctcagccaggtctgcctgggagacctgtgttctagaatcggccctgctcctgacttgccccactcaggcggtcctcccccgaggtgctgtctgcatggggttgaataagatgaaccctgaggccctgctgcttcgcagtgtgtggccctgctccttgaggtgtgaaaggccagggaacagggtgcttgctggggacctgcgggaggactacaaggctttctggtggccattcctgtgtatacagagggcggggctcaccagggcaggctgatcagcccggaggacctcaaggtacaaataggaacaaattggcttggagaatgagtcccacttcttgttctccctgggcgggcctccatgctagggagaacagagatcccaaagtggaggaatttgaagtgcatctgggaagcttgttgctcctatatttgtcccgttgctttgggttcatcctggtctccactgtttcatcctgaattgaggtgggatcaacctctggaccttggcttcctttcttttcttgcctgaggagtctgcttctgaagctccttgatatctacaatgttgtcccttgggttaccgaaccgttttctcttatttctctatgattgtctgttgggtgacctgagccagtatctttgggtgccgctcagtttagaaagtcaatatggggtagtggttataattgttgaagcccttggtttgaatctcagctctgccacttgctagctgggtgaccttggacaagtcacttaaactctctgtgcctcagtttcttcagttataaaatgggcagtgctgacctcatagagttattgtaataagtagatgagacaatgcctgtaagatgctcagacagtacctggcataaagttggcgattatttttctgatttcattcaactccttgatgttggctctgttgctgtctccctggggcgacttttcccccttaaaactagcctggaggtgggtgctgtcttgcagcaatttttttcttgttgtaccaaattttcctgttgtatcacagggcttttgggattttaagggattaccttgaatctctacatgggagagtttctataatcagagggagcattctgggttggcctgagcaaaggctgcagcacagaaagtttatgaactgctcttctaccctctcttgctgggctgctgtgtacagtggaccaggttgtgcagcctctatgatgactatgaaatgaatggcagcttccccccaagttgaggaatgcataacctcactaccatctgtggtaacccctctcccaggggtcttgggtgtccctgagttttcgtctgggggtagagagagaagcatctgtggtaacttacgccaattggcctgaagctgtccttactctggagggggcattcctagtgggttcaggactagttccctgttttccccacccaaggccccatccagctgatacctggcgggcagaggcagtggaaggtggcaagtaggtccagacaggtgcttcctgggtggcagggctgggagaggcactcattgtgatcagcctcacaacgggagcctgtgtagccaggtggacagaggcagttgaaggagccaggagtgttgaggcaggaaccgccatgttcacagggacttgggccttgctgggctgggaggagagaagagctgggagtccacaggggtcagggcaggaagggcaaggaggtgagactgtcagggaaggtgtgggggcctgcgtgtggcagacgagaccaaattggggaaggggcttgtgtctttaagatggaaaggaaataagggaccaaattcatggggactgaggggctgaacattggagagagggtcatgtaggcaagagatgccaaatctgggcaaattcaaggaaaaagatgtttggttttttaattggaaaagcaatctgcccccttttctgtcttcagtgcagaggcctgtctgaggctcagagaggctctgaagtgggagtggcctcacccatcagacactcgtccaggtcctggtggcaggtgggccccgaatagccaggctgacacaggcagagtgtggagcctgtgagggggttggtgctgcattgggcatccccatggcacggctggctcagacacatgtcttccaagtggcacaggagtcctggaggggtaagagggggtgaggctctcaaaggccatttgaagctcctagcagtcctcctggtgcttctctcaccctccttctctacctcccacctcctgataccctctacccccatacctgtgcgtccaggtgggcagaggcaggagaaagagcccacccggtcaatgcaggtggatcccggggcacaggtggcagcaatacagtcatccaggttctcctcacagcttgtgcccccccagccactcacacacacgcagtgaaagctaccagcagagttctggcaggtgcccccgtttctgcagtgagggggaccctgggcctcacactcatccacatcttcggagcagtcccagcctgcagggggttggggaggggacgagggctaaggctgggagccctatgagtaggggaggccaggggccaactctctgggccatgggtgtcatggatgtggcttaaacaactcacctgtccaggtttctgggcagaggcaggtgtaggtgtccagcccatcctggcaagtgcccccattctgacattggtggctgacacagttgtctggattcacctcacagcccgggcctatgaaacctgacagggtcatggatcagctgtgggaggaggctccaacggagacatcctgccctgcccagagagaggggcggccggagagcccctgtgaggacacacctgggggacagaggcagaggtgaaaggtggagtctttctctggcatcagctggcaggtgcccccattcgaacagcccctaggagggcagggtcctgcccgcagctcacaacgtggaccctcctgccccacagggcagaggcactggaaggagcccagggtgttatggcaggaggtgcctttggggcagggtcctgggtcctggaagcactcgttgacatcacgttcacaggcatggccctcgaagcccggtgggcagtggcactggatctgggggtacgtggccagacacacccctccattaacacatgggttggctgaacagaagtcccgaagctggcactgctcacctgaggcagaggacagagggagccgtttctagcattgtacgaattctagcccatctgaggttacccagtgctcactctggattatctctgggtctcattttcatatttccttccctttattaccatactttctttgctctgttccatcacccctgctctgagcgatgtcatggcttgggagggtttatctggagtgaccatatcttctaaagtgatgatgagagtattgcaaattggccttgcctgagaaaatctgggacgtgggtgatcttgggggaggtgaaaagcaccccacgtctgcaggcaggagactcaggtggcaccatgctgtgccacaactggttgtatacccttgggtgagccactttgcctttctgaacctcatttcctaatctttaagtgggtttaggcacctggagactcacttcacagtccatgtgcaccagtggtaatggcggcagcagtggaggtgccaggtgctgagctgagcaagcatctcctgagcatcggccccttctgtcctctcagcaaccttatgaagtgtgaccattactctccctgtttgtcagctgacaactgaacaccagaaagctaaaatatcttatatgaggtcatgtagctgatcagtggcagagctagcatttggatccaggggctggtgcagagcccctagaatgaagcactaagcttgccccagggttacacccctcctcctggggcggcccccaatccactctctgggtcacatccttcccttcccggtgcccctcccaccactgcagtcttcccaggtgatataatggctccctccactcagaatgggagccattcagatgctcagaatgcaaaagtctggaggacccctggtatgcagagcaatgaccctcttctagctgctaggcaatggggagattaaaggggctaggacaggcatcaggatggtgcacaaagggggctcatggcacccttaatttggaaatattttaacattttagcaatcagtacaaccatgctggtgaatgttggttgtgggtaagtggattgccaagaattggcatgttgattctcatggcttctgtcttcaaagggcttgcagtttctcaggctccagttctatcttccccacccacagcctagcccattgctcctgcctgtcccctcctggctgcccccagcagcgcttacctgtccatccaggcatgcaggagcactgtgggcggcccgaggcctggatgtggcagcggccccttttggaacagaaggagggaggacaagggtcttcaagcttggcctggcatctctcgccagtgaagccagggaggcaagtgcacaagaagctgggtgtcaatggagagggagagctggggagccctaggggagcgggaagcagggcttggcagctgcctccattttggcagagctgggcgttctggcaggggtcaggaaactggcacgtctcacccaggaagccaggggcacacctgggcaggggaggagaggaaaactcacatcactggcccctcttcctattcttgcccactccctcctctgccttcatttgtttcccttcatctccttcacttcctctctttcttctttggtctcacttcctcacctctccccccctgctctccctccccctttctctccagtctcccactcctgcaaggcacactcactggcaggtcccttgtcccagagacaggctcaggcaggtgcctccattggcacagggttctgggaaactcccacacagcagccctgagggaggagaggcaggcgcaatggaagccctgggtgctgtgcctccacctttcctcttctaggtgctcctgagagacctgcccacagcagctcccacaggtactctaaaccacctcttcttcacatctgtccccactctccacatggtacccagccccagccccagtgccctccgtcccagttactaatccctacccccctttcctgtttattctctggcctcccaagtccagcctcggactccatctctcggaagcaagacaacaggggtcagaagaggggcggaggtggctcccgggaggtgaatggctgagacttcgaagagatttcctcccggaaaggccgagcattgagccatccggggggtggggacagctggactaagaaagggcttagtaggcctgacctttcatgtccccatctcctgcttccctctcatctcctccccaagcaggtggtcagtgtgttccctcttcccctcttccctatggctgcaagagtcctccagtgccagtgctgacgaggttcttcctggaggtgggcaccctctcacccatcccccagcagtcaccacccctggcaccaggcccaaagcagctccatgggcagagccgtctttccctggaggccgtctctatttgggcagtgagaatctcctccatccagcatccctcacacggcctggggcttggccctcttcccccaccccactgaacatcctcctaagggagctgggtcccctcacctcacccacgccatgcctcacctctgggtctgaccactgagacacatagcagcagcagcagcagcagcagcagcagtgaagggggctgcattccacagccccttctccaagccccagtccctgtccctcttcaggcagggaccctcagagctctcactggggcaggagccacctcctctgctcccactgcccctcttcttcctcctcggcctgctgcaagcctcacgtctgagctgtttcctgagtcacacaatgtcctggacaccctagtaatggggggcggaggaagagtggaggaacactaggggggatgaaggaggggccttctgtccctgacaacccctggggaagtagggggaagtaggacggtgtgcctggagggcaggtgataggaggggagaaggaatctcggaaccccctgggcagtcccagccctgctgtttgttgatctggtctctcctttctagggatgagaattgcaaggtggctgccgtgtgccccaggaggggcaggacctggaaacaggtattgggtggttacagagttctgtattcctcctcccaggagaggatgcttaatttgccaggttattacagatgcttctcagagaacctgcaacttgtcataatttgaaaccactcaccttggctaaaggaacccaggggcttctgggccttatcttggctcttgccaggacttatttttctccttctggcgaatgggcaagatgctggccggttttggggaaatcttggtcttcctgttgtaggggaatgttaagactgtcattatcagtgataaatgaacatagtctaccctaaattttgcagtctgaattgtctgtaacaaacactgaatttgggtagttttcacttcctccatctctgcctccctccgctgtcaaggtccttgggatgcagggaatgccagtcagaatgcaaaattggagtcaataaaatcacaaaagagaattctttgcctcagaatgctcatcctaccttcttgagtcaacccaggacaactttggggtcaaccacacactgagttcctttagtagcacagggaactgagagtccagggtggcagaaggtgtcagtggcagctgtgctctccctggtgttgaggcactcatggctgctgctggtgcacctgagagccttcccctaccggggaatatacttcaccagcaccactttcttcctttttttagctttttattttaaaatacttttaatctcatgggaaaggggcaaaaatactaaaaagaattccaggatacccttcactcagattcatccactaatatcatttgaccacatttactttatcattatttctctataaatacacatttgtattttttactgaaccatttgagagtaagttgcatacaagataccctttacccttaaatccatcagtgcaaattttctaagaacaaaacattcttttacataatatagtacaattatccaaatcaggaaacttagaccgatgtaatactatgatctaattgacagtccaaattcaggtcctgccaattgccccataatgtccttcatgacaattttttcctttggtctaggatctcatttggcatcctgcgttgcatttagctgtcgagtctttttagtttcctttaatatgagtacagtaccttaaatgtactttgcctttcattatattgactttttttttttttttttttgagacagtccaggctggattgcagtggcacgaccttggctcactgcaacctccaccgcctgggttcaagcaattctcgtgcctcagcctcctgagtagctggaattacaggcgcccaccaccacgcctggctgactttttgtattttagtagagacagggtttcaccatggtgcccaggctggtctcaaattcctgagcttaggcaatccacccatcttggcctcccaaagtgctgggattataggcgtgagccaccgcacctggccgatactggcatttttaagcatacaggacagttgttttgtagactgttcctaaatttgagtatgtctggtgtttatgcatttttgggcacaagtaccagtgtatcacatttggaagcccgtgagccagcatcatttataatggtcacccagtattctactagttcatttaaaccaatttcctattatagcatgtttaggtgggtctcaatttgctttctgtttttttagagacagggtcttgctctgtcactcaggctggagtgcagtggcacgcacatagctcactataaccttgaattcctgggctcacagcaacctccttcctcggcctcccaaagctctgggattacaggtgtgtaccaccacacctggccttcaatttttaaacatataataaactgagctgtggtaaatattctttttttttctttttcttcttctttttttttttttttttgagatggagtctcactctgttgtccaggatggagtgcagtggtgtgatctcggttcacggcaacctctgcttcctgggttcaagctactcctgcctcagcctcctgagtagctgggattacaggcacatgcctggctgatttttgtatttttagtagagacggggtttcatcatgttatccaggctggtctcgaactcctgacctcaggtaatctgaccacctctttcggcctcccaaagtgctaggattataggtgtgagccaccgcgcccagaccttcggtaaatatccttgaacttacatatttgcatggctaattattgccttaggctaaattctagaagtgaaaaccctgagtgaaagggtgaagacatagacttgttttaaagctcttggtctctatgtgttgccaagccattctccagaaagcagtgaggcctttctactccagttagtagtgtctgcctgtgtccttactctcgccaaccctccacattagaatcctcgccactttgatagatgaaatggtctcttattgctcctttaaactgcacatttgttgttaagtgtcaacattctttttaactgtttaatggctattcgtgtttcctgtccatgcttttgtgagtttcctgtccatgcttttgtcccattgtcctattggtgtcattgtcattttcccatcaccttccttagttgaggaggcaactgtgggtatggggaagaggaaccctagtgtaaaagtccctgcttttgtactctctggtttgctgactggggatttggtgctggtgagtagtgaaaggaaaataggaagagacaacaggtttctcatggaaccgcgaagaccttggtggaaagaactgaactcaccatttctgcaatgttgacaatctaacaccatttgtggaaaaggaggctggggcactaggctggagcatgagaaaaaggagaaattgcaacggagacagagaggtggttaggtggaagggaaccagaagtgtggtgggcagaagctgagtttaaagacagtgtcaggaagctgcctgcccacttcttgctttatcctgcttaaggtaaggcagtgtgcacctgctcaggcattatgagctatgcttgggtcccagatacttttcctggcctctaagaccttacagcccaaagcagtattgatgctcccccaagagcttgtttctccttcccaatggcttcccaagggttgatactgaccagggtggtaccatcatcactacagtgaactgcagcatgccagggatacagatagttccctctgggaaatgaccctttttcctacagtatttcatcaaatagagattcattttattaaagggattttctttcattgtataccccctgagaaggataaacctgtcagtcattcacacttcagtcatagggacttgtgaccttaaaaggtgaactccgaggttggccctgataatgtgtccaaacacaaagaaggcaataggccactgtagccatagagataagcaagagtgccaggtgcagcggtggctcatgcctgtactcccagcactttgggaggccaaggtgggagaatcacttgatcccaggagttcaagatcagcctgggcaacatagggaaaccccatccctatgaaaaaatacaaaaattagcaggccgtggtgatgcacacccgttgccccagctacttgggaggctgacgtgggaggatcacttgagcccaggaggttgaggctacaacgagccataatcatgccactgcaatccagccagggtgacaaggtgagaccagagtgagaaaaaaaaaaaaataagaaataagcaagagtaatccactcttggagattatttgtaaatatatggttcgggagatatggagccccccgttgccccaggcccctccctctctgcctccctgttggttactcttcatctcgccaacctcttaccattgtagtgtccatggttattccctgggcctcttctagttttctgtctccctaggtgatctcatccagtctcctggctccctaccagattcagataccatctatgaagaccacctttgtgctgatgactctcaagatcatacacttcccggaactccagacttgtacttccaagtacaagtaccacaaacttaacatgtccagaactgacctgatcttctcccttaaccttctcttccttcctgatagaattgagttttgcagttctattctttccattgtttaggcccaaatccttgaagatattgctgattcctctctttttctcatactccacatccaaactgtcttaaatcctgtggactctaccttcaaaatatgtatatccaggccgggcgcggtggctcacgcctgtaatcccagcactttgggaggctgaggcgggtggatcatgaggtcaggagatcgagaccatcctggctaacaaggtgaaaccccgtctctactaaaaatacaaaaaattagccgggcgcggtggcgggcgcctgtggtcccagctactcgggaggctgaggcaggagaatggcgtgaacccgggaagcggagcttgcagtgagccgagattgcgccactgcagtccgcagtccagcctgggcgacagagcgagactccatctcaaaaaaaaaaaaaaaaatatgtatatccagaatctgagcacttctcatctcttctcatccctattgccaatatcctagtccaagcctatgtcatctcttgcatctcctaacttgtcttcctgctgctgtccttgctctccttgtccatatctctacacagcagccaaagtgagtcagttgaaatacaagttaggccacctcactcctctgctcaaaagtctccaatcgcttctccactcactcagagtaaagctaactttcctacagggcctgcaaggctctgcacaaggcctttccctctcaatctctttctctctctctcttttttttttggtgagacgcagtcttgctctgtggcccaggctggagtgcagtggtgcaatctcggctcactgcaacctccgcctccccggttcaagcgattctcctgcctcagcctcctgagtagctgggactacaggtgcgtgctaccacgccgggctatttttttgtatttttagtagagatagggtttcaccgtgttagccaggatggtctcgatctcctaacctacctgcctcggcctcccaaagtgctgggattacaggcatgagccactgccccccagccaaggcccttccctctctaacctcatctttgattacttctcaccatccagccccattagcttcctgctgttcttgaaacaggcacattcacaccttagagccttgttcttctcactgcctgaactgcttccttccccagctgtcttcgtggctctgtccctcatctcaaaaggcacctaatcaaggccttccttggctaccccatttcaaaactggaagccttctctcatgttccccacccccattggcttttctccttattatttctcaccatctaactaacatatatttaatttatatttcttatttactgactgccaattccacaaagtcaaggatttttgtctttttcatttacttgtttttggacttgaccatgcctcagtgtgtggagcaggacctcaactcagcgtgcactgtctcacttaaaatacccccaggaggagggtaccattacctccacccacagtgagatgtggagctcagagaagttgagtcacttgtacaagttcatatagctactaagtgtgtttcagatgtgagttattcacatccaaacccatgttctttctaccctgaggcgccatctgtcttagtagggtttattttttgtcatttaaaaaactaatgtgggcatggctgggaaacaagtttctgcttcgattacatcagaaactacagatccagacattctcttatgcctttgctgacattcagtgcagcattcagtaagtactgatgcatgtcatttgcttatttacttatcagttcatttacacagtatttattgaacacagtctttataccccgcaatgttttaggccctgaatttatggtcttgaacaaaatagacagataccaagtaaatatgaaatataatatcagatagcgataaggagtatgagatgatataaggcagggtgaggggagagagaagaacttgggggctactttagattgggaggttggtcgggtgcggtggctcacacctgtaatcccagcactttgggtggtggaggtgggatcatctgaggtcaggagttcgagactagcctagccaacatggtgaaaccgtgtctccaccaaaaatgcaaaaatcagccaggcatagtggcacacgcctgtagtctcagctactccagaggctgaggcaggagaaccacttgaacctgggaggtggaggttgcactgagctgaaattaagccattgcactccagcgtgggtgacagagcaagactctgcctcaggccgggcgtggtggctcacacctgtaatcccagcactttgggagaccaaggcaggtggatcacctgaggtcaggagtttgagaccagcctgaccaatatggtgaaaccccatctctactaaaaatacaaaaattagccgggcatagtggtgcacgcctgtagtcccagctactcgggagattgagacaggagaatcgcttgaacccgggaggtagaggttgcagtgagctgagattgtgccactgcactccaacctgggtgacagagtgagactctgtctcaaaaaaaaaaaaaaaaaaaaaaaaaaaaaaaaaaaaaaaaaaaaagactgagaggtcaataagagatggcaactgtagtttcaaaaataagtaccaaattaaactgctcatcaccacacccctaccatctctaattaggaatattgtgatagcatcctacctggcacccttgcttccaacttgcccccaactgttggcccaggccattctcgatgtggtgaccagtgagagatgattggggcatggtgagtctgatttggaatatattttaaaactagagtgggtatagtttgactgaataaggggtacacaggttgggtctccaggaagtggactttgagatttaacccggagctgggatggcccttcagagccatccccaactggggcaagggagctgggtttttgccccccacattaatcagtcatggaaggtgggttgctcctagaaagagtgtgaccttggggaagcaattatcttcagtccacaaagagggctgagaggtgagggctgtccttgagcagaagacttgggtaacactgtcaactaactaagtctaacggacatctataaaacactctgctaaacaatagcaggatataccatttttctcaagtgtacatggaacgttctccaggataggccatatgctaggccataaaacacgtctcaataattttaaaaggactgaaataatacaaagatgttctctgatcacaatagaattaaattagaaatcaacaacaacaggaaatttgagaaaattacaagtgtgtgaaaattaaacagcatgcttctaaacaaccaatgggtggaagaagaaatcacaaggaaaaccagaaaatatttcaagctgaatgaaaattgaaacagaacatatcagaattaatttttgacatgtagctaaagctatgcttagaggggatttatagcttgtaattcctatattacctcataccatacacaaaaaaccaacttaaaattgatcatagacctaaatgtaagtgcaaaactataaaactattagaaaaaggcctaaaagtagatattcatgatgttgggctaggcaatgatttcttacatatgatactttcttacatctacacaagcaataaaatagtattttgtttttggagacagggtcctggtatgtcacccagtctggagtgccatggtgcaatcatagttcactgcagcctcaactcccgggctcaagtgatcctcctgcctcagcttcctggatagctgggactacaggtgcatacaaccacgcttggttaattgttaaattttttttttttttttttggtgtggagacagggtctcactatattgcccatgcttcagataaaatattgataattggatttcatcaaaattgaaaacttttgtactccaaaaggcaccatcaagaaagtgaaggctgggtgtggtggcttacacctgtaatcctagcactttgagaggccgaggcaggtggatcacttggggccaagagtttgagaccagcctggccaacatggtgaaaccctgtctctaaaaaatgcaaaaattagccaggcatggtggtgcatgcatgtagtcccagctacttgggaggctgaggcaggataatttcttaaacctgggagttggaagttgtggtgagccgaaatcatgccactgcactcccgcctgggtgatagagcaagactctgtctcaaaaaaaaaaaaaaaaaaaaaaaaaagaaagtggaaattgccttcattaaggaaaaaaacaaacataaaaataacagcaaccataagaaagtgaaaagataaacaaaagcaatagaatgagatcaagtatttgcaaatcatttatcagataagggacttgtatctagaatataaaaagaacttttataactcaataataacaataaaaaatgggcaagagatttgaatagacatttcaccaaagaagatatataaatggccatcaaatacatgaaaacatactgtttggggttcacttagcttcttgcatcaatcagttaatatcttttgccaaatttgggagtttttcaggcattgtttctttgagtacattttcctgctccattctctctctcttcttcttaaatgctgatgacagaacgttagttagctcttttgttacagtcccataaatgaacctctgttcatttttttcagtctatttttctccgttgtccagattgagtaatttctcttctacctttaagttcgctgaatctttcctctgtcctctccaatctgctgttaagccaatctattgagtcttcaattttcatgattatatttctaagttctaaaatttctatttgattcttcttcttcttttttttttttttggagatggagtttcgctgtttttgcccaagctgaagtgcaatggtacgatcttggctcactgcaacctctgcctcccaggttcaagtgattctcctgcctcagcctcccaagtagctggaattccaggcacctgccaccatgcctggctaactttttgtatttttagtagagacggggtttcaccatgttggccaggatggtcttgatctcttgacctcatgatccgcccacctccgcctctcaaagtgctgggattacaggtgtgagccacctcacccagcctgattcttctttatatcttccatttctttgccaaaatttctggttttcatttgtttcaagagagtttgtaattgcttgttaaatgttgtttttttttttttccttttctttttgagacaaggtcttgctctgttgcccaggctgaagtgcaatcatggctcactgcagccttgacctcctaggctcaagtgatcctcccacctcagccttcaagtagctggtaccacaagtacacaccaccatgtctggctaattaaaaacacttttttttccaaggggctgggaccacaagtacacactaccattcctgggtaattattattattattattattattattactattttgttgttgttttttgtagagacagcatttccctatgttgctggtcatgaactcctgggctcaagtgatcctcccaccaggcatgagccactgcacttggctgtaaagctttttttttttttgagacagagtctcactcggttgcccaggctggagtgcagcagtgcaatcttggctcactgcaacctccacctcccaggttcaagtgattctcctgcctcagtctcttgaatagctgggattataggcatctgccaccatgtctggctaatttttgtatttttagtagagatggggttttgccatgttggccaggctggttttgaactcctgacctcaagtgatctgcctacctcggcctcccagaatgctgggattacagatgtgagccaatgtgcctggcctgtgaaactttttttttttttgagatggagtgttgctctgtcacccaagttggagtgcaatggcatgatctcagctcactgcaacctctgcctctgggttcaggtgattctcctgcctcagcatccctagtagctgggattacaggcatgcaccaccatgcccagctaatatttgtatgtttagtggagacggggtttcgccatgttggtcaggctggtctcgaactcctgaccttgagtgatccacccgccttggcctcccaaagtgctgggattacaggagtgagccaatgtgcctggcctgtaaagcatttttaatacttgttttaaaatacttgcttgctttaaatatgcatcaggtgattccaacatttaagtcaacttgggtgttgatgtctattaattgtcttttcttattcaagattttcccgattcttggtatgacaagtgattttcgcttgcatcctgcacattttggattgtatgttatgagactctggatcttatttaagtctgttttagtgatcatcctttgacaccgcactagttgagcaaagagggtgctgcctcactgctgtcaggttgggggagaggcccaggttcctcacttggcctctgtgaacacttgagggagccgtgctccttgttattgctaggtgtggatgggggttcaggcttcccactaggtctctgctgacacaccctggctgagagagtaagaagcacctcattcctgttccccacggggtctccagtgacactggttgtgatggagggggatttcataccaccaggcggggctgagagtcccagcttcctacttgctggggagaggtgcctcagctgggtgggagttgatggctaaactccccactcatcctttattggcagatatgggggtgagagtgttttttttttttttttttttttttgcctgaaatagagtagtcattgtctaaaagttttgtctttccaggatgttcctttgttggtcctttggccagagactttccgggatttttttcatcttcctgttggagtttcctggttgctggcttttccagcacccagtcttgtatatatgaggcaaaagccaaacccagggaactcaccactatattgttttttcgggtcttgagattcctagccagtctgccttctctgcatctttcaggatcttcttatgtttgttttatatataccatccaggattgtagctgtatttagcaggaggaatcagaagagcatctacgtcatcttgtcttggagcttgaaggcagctggttaagtccttaaaacattcaacacagattttccatgtgactcagcaattgggttcctaggtatctacctaagaaaaatgaaagcaggccaggtgtggtggctcacgcctgtaatcccaggaatttgggaggccgaggtgggcggatcacccgaggtcaggagtttgagaccagcctgaccaacatggagaaaccccatctctactaaaaatacaaaaattagctgggcatggtggtgcatgcctgtaatcccagctacttgggaggctgaggcaggagaatcacttgaacccaggaggcggaggttgcggtgagctgagattgcgctgttgcactccagcatgggcaacaagagcaaaactctgtctcaaaaaaaaaaaaaaagaaagaaaaatgaaagcgtattgtccacacaaatacttgtataagaattcatagcagtgttattcacaataggtatgaagtaaaaacaaccaaatatccattgatcagtgaattggtgaacaaaatatggtgtgtccctttgggaggctgaggcaggtgcatcacttgaggtcaggagtttgagaccaggctggccaacatggtgaaaccccgtctctactaaaaatacaaaaaatttagctgggcatggtggtgcacccctgtaatcccagttacttgggaggctgaggcagaagaattgcttgaacctgggaggcagaggttgcagtgagctgagatcacaccactgcactccagcctgggtgacagaacaagactctatctcaaaaaaaaaaaaaaaaaaaggtgtgtccatacaatggaatactattcagcaataaaaatgaatgaaatatggatacatgctgcaaaatgaatgaacctcaaaaacattatgctaagtgaaagaagctagactcaaaaggctgcaggaatccacttacacgaaatgtctaaaataggcaaatctatagagacagaaagattagtgattgtctagggctcaggtttggaatgggggctaagtgcaaaggaatatgaaatttctttttggtgtgatggaaatgtttcaaaattagattgtggtgatagttttacaactctataaatatactaaaatcattgaattgtacacttaaaatggatgattttttcttctttgagatggagtctcgatctgttgcccaggctacagtgcagtggtgccatcttggctcactgcaatctccacctcccaggttcaagcaattctcttgcctcagcctcccgagtagctgagattacagggggccaccactacacctggctaatttttgtatttttagtagagacggggtttcaccgtgttggccaggctggtctcgaactcctgacctcaagtgatccatccacctcggcctcccaaagtgctgggattacagctgtgagccactgcgcccgaccaaagtgggtgaattttatggtatgtaaattatgcctcaataaatctgtgagaggagaggaggtagagacattttgtgttgtagaatttcttaaggaattttgctgtcaagagctgcagagaaagtatgtctagcgagacagcatatgaggtcatgagaaattttaaaaaactcattattccagaaaattcatacacataaatagagataatgaaaaagaactcccatatacccgtgacccagatgcaataatcattaattcaggaccactgatgcctgtaatcctagcactttgggaggctgaggcaggtggatcacctgaggtcaggagttcaagaccagcctggccaacgtggtgaaaccccgtctctaataaaaaatacaaaaattagccggacatggtggtgcatgcctgtaattccagctactagggtggctgaggcaggagaatcacttgaactcaaaaggcggaggttgcagtgagtcaaaatggcactccggcctgggcaacagagcgagacactgtctaaagaaaaaaaaaattcaggaccactctggttccatctctactcccaacctccataccagattattttagaacaaatcccagatatgatatgatatgatatgacatgatatgatatgatattgtatcatttctatcacaaatatttcagtatcctaaaagataagaactcttaaataatataaccattttgctagtattatttctgaaaagtttacataatttcttaatattatcaaatatgcaatgtttagttttcccaaattctccattaaatatatatacagtttgaatcaatatcaaaacaatatccgtgcattgtattcagttgatatgtgtcttaagtctctctttctcttctttgaagtggaattcacattttagaacagttttagatttatagagaaactgagaggatagtacagagtattcccatgtgccctccctggattcagtgtcccttattaataacatcttacgtgagtgtgggtatatgtgttataattaatgaatcaatattgataaattggtcgggcatggtggctcacgcctgtaatcccagcacttcgggaggctgaggtgggcggatcacctgaggccaggagtttgagaccagcctggccaacatggtgaaaccctgtctctactaaaaatacaaaaattagccaggcgtggtggagcacacctgtaattccagctacttgggaggctgaggcaggagaatcacttgaaccttggaagtggaggctgcagtaagctgagatcatgccactgcactccagcctgggcaacagagcaagactctgtctcaaaaaaaaaaaaagataaattattattaacgtccatacttcattcattcagattgtcttagttttcacctggtgtctttttgtctgttccaggattccatatttcttttccttttttttttgagacgaaattttgctcttgttgcccaggctggattgcaatggtgtgatcttggctcactgcaacctccgcctcctagtttcatgcaattcttctgcttcagcctcccgagtacctgggactacaggtgcccaccaccatgcccggctaatttttttgtattttgagtagagacggggtttccccatttggacaggctggtctcgaactcctggcctcaagtgatctgcccgcctcggcctcccaaagtgctggattgcaagcgtgagccaccacgcctggccttccaggttaccatatttcatgtatttgtcatgtctctttgggccctcttggttgtgacagttttgccagtgttccttgtttttggtgaccttgatagttttgaggtgtactagtcaggtgttatgcaggctgcccctcttttggaatttgtttggtgattttctcatggttagacttggagcttaagtctctttaaatctttttttacccccttgacatttatttgttgaagaaatggcttgtttcctatagaactttccacattctgaattttgctaattgaatcactgtaccatttaccatattcctctgcctcccccattttcttcttaaactggtagttagatttaaagactttatatgattcatgatctattttctggcaaggctacgtcataggtggtattgtgctgtgtttctatcaggaggcatagaattctagttggtagccatgatgagcattgctagatccattattttcttagggattataaaatgcagatattctaagtctattattctgtctaaactgatttcatttatacagattatgtcccatctactattttgacatgacttatttaggaaaggcagattgatgccattctttcccctttatttagcagctttcagaataatgagtttgttctctagcatctgccaaaggtaaccaatgaccctttatttagtatcactatgagtcagttgatttgaatgtgttttaatccgttgctatcactatttttactgaggctccatttatgccatatttgggcagtgcgagcctcaagttgataaaatactaatatctttgatgcctttcttgttttctggtgataagatgttcaggctcatcttgtacataagctgctatatgtttctttttagaggaaatggtactaggagacctcagtttgggtgctgaggaaggtttgtatttattcattttttattttctaagataggaggaataacatatttgcttgctgatgggagtgagccactgcagagggaaaggcggtgtgcaggagatggggtattgctggaggaatggccctgagtaggtgagaggcagtggggtctagtgcccaagtggaggagttggttgttagttgaaagtgaggaagatgagctgagcacattggctcatgccagtaatcccaacattttgggaggctgaggagggtggatcacctgagtcaggagtttgagaccagcctgggcaacatggtgaaatctcgtctctactaaaaatacaaaattagccgggtgtggtggtgcatgcctgtaatcctagctaattgggaggccgaagcaggagaatcacttgaacccaggaggcagaggttgcggtgagccgagattgcgccattgcactccagcctgggccatacagtgagactctgtctcaaaaaaaaaaaaaaaaaaaaaaaagaaagtgaggaggatggaggctgtgtaatgaaatacaagaaagtgtgaaatagttgccttgaaattctgtgagtgagtggccaggaaaatgccgtatacttctttttcttttctttactctaattccatcacaggttatctgctgggtgtttctaatggccaacttgaagtttgtaaatgtttgatgagcatggttgagtatttttatccaaccacttcagctgcttggatgcaggcatggagtcggtgggaagttggaggtagccagagctaggcttttgacaggcaggcatgatggagggaatgagggaaataggagttgagatgcaagatagctcttacaacaatgcttcatgaaacctaagcgggataaggttgggagggcacaggatctcataatgtcagggtcaaaggggttggaggtctggagaagtgaaaatattgtttgatctttggaggtggacactagagggagtgatctgcaaggacaggaagggggatacttaaaactgagattatggagaggtttcaggtacaggtacaggtaatgacaaggtctagatatgactgtggagtgagtggctgtggtagggggaggacaagatcactggaggtgagaaggtcaaaaggtcaaggtgagaggccagggtgttgggtggagtgtcttggttgatagagaagccacaaagaatggtagcaggagtgggatgaagagaaagacagtgacccagggactgaaaattttagtgaattgtgaagagtgaggagtgactggaaggctgttaaatgctggcaacaggagcagctgaaggtgacgttggaggccacatgtactgcaaagcagctaaggccctgcattactcttgaccaccagagaaaagttcatgtattcattcatttattcaagcagtaagttaaccaagcttgactatctaccctgtgcttagcaaaaccctccctgccctcacagaatgtatatgtattcattacaaaattgtccttataaagtcaggacatcttcaggacacttccagttaatcagacacccccgtcaatccttctagttaactgacagtttttttggttgtttgtttagcagtgaattttaatgaataaaacatctgggattaaaactcttttttttcctccattttttgagatagggtcttgctgtgttgcccaggctggagtgcagtggtgcgatcttggctcactgcaacctctgcctcccaggttcaagcgattctcctgccctagcctcccaagtagctgggactataggtgcacaccaccacacctgactaatttttgtatttttagtagagatggggttttgttatgttggccaggctagtcttgaactcctgacctcaagtgatctgcccgccttggcctcccaaagtgctgggattacaggcatgagccactgtgctcagccatattaaaactcttgtgtaataaattcgcagatatggaaatccttcattttccacaaaaaaaccccatcctgtgtagataccaggtgacctcatcacaagagtcaaaatgaaagtgctgtcagcgtggtgagagaggtggtgatgtcagatcacctgtggaagtgaaaggaccttggagttgaaaggaatcttcaggatggtcttgcctctggctttcaaactttcttttcatcatgtcaaatgtagaggaattttgtccatcaaactcatatctagaatcccaaaatagagaagagatataggatcagcgctctggctgagtctttcccctcctgagaccccacccctacccagagtgacccttcaaggttgccatgggatgtaggatgctggggaacacagcctggaactgttcacttggtcccatttcttcttttactgaggcccagaggggagacgcgacctgcccaaggtgacacaggcttgggacccatgcccagtgtcctgcttgctggtcaggagtggctgaggaaagcagagcaggggtgaggtgggaggaaagggcagggccgcactgccttggttctggagccctcgctgatagccttgggcctttttcacttgtttttctaactttggggacaaaagattttctttctttctttctttctttctttccttccttccttccttccttccttccttctttctttccttccttccttccttcattccttctttccttccttccttccttccttctttctttccttccttccttctttccttccttccttccttccttctttccttccttccttccttccttccttccttctttctttctttccttctttcgcaacaaaggcatgataagaaattttttggtgggtagagcagaagagtatataatagtgaaaaaaacacttagcttaggagtttgacacagtgtgatgttggtcagactagctaacctctctgagcctcactcagttccttcatctgtaaagaggttggggctggcgtgggtgagtgggtgggtgctggatgaagagggaaggagatggacaggaggcacctggcggacttggccagtgtcagctgccgtcctaggagactctgggctggggcggcattactggttatccctttcctggggaggttgacaattaaccctggaaacagtctttaaaatttttactggacacatataattatggattgacaatcttccattttaaatttagaaactacaggcaaaagttaaagatatcacaaatgagttttttatttttattttttcatgacaaggaaattagttgtgtgctggggtctagtatggggaaagaatctattaaaatatatttaaaaaggtaaatccaaaaatttataattacaagagtgaatgacaagatgattgtcaataaaattaaataagcaaaacaactgcttgccctttagaaaatgtatccaagctccagggatccaaaatgtttatgaatctgtggatgtctgtgtgtgtgtgtgtgcgtgtatatttttttttcgttgttgtttctctgcctctctcgccaaactatatggagccctggctaaggatagaggactgtcagatgtgttttcaggggaatcgctgttttcttcacatcagggggaagttcttaggcagctgaaagcgggggctcaggtgggcatgggggggtgggagggctgaggtttaggatgggagggtgggtgagagctagtaagggtgggtggggcactgggggtgggcagtgggtacttggctaggggttcaggacctgtctcagggctgctgtccaggggggtggaggaaggggtagtgaaggggtcagagcactcaagatgcgcagtgtaggcaggggacaggctgcggtgtgtgaagagggtagcctgaggtggtgagacttgctgatcacccagctgggctgccttggtctactcacaactggtcttccctgtgtgtttggtaaacaccaaaggaggtaaactctccaatcctggcctgtgctgatggtgaggcgggagaaggcttccctgggtcccaggtccccaacctggcacagtcatgggtcaagggctgcctgttcctcacctgccttcctcacggggcttctgagcctagccttgcttcgggcattaggagagtctgcctggaaggctctctggcccccaatgccctgccctccaaggctcccagtctaggtgggagagacatacagaacaaatagcatcgtgggggtggtgggaggtggtgtgaacatgtctcctgcaagctctgggaagaagctgtggccacacaatggaatgtctccagccctgacctctccttggaactcagacctttctgcctctctcgccaaactatacggagcacctggtaaggatagaggactgtcggatgtgttttcagtggaatcactgttttcttcacattcttcacatcagccacctcctccactccccaccaggatgtcaactgaaacatgtctcagtccaaattctttattccctgcttctgcagctattccctccctccccgcaatcctggcacagcgtattgcttaggctggactacgctgtgaatgtgtctcccaaaattcatgtgttggaaatttaattcccatgcaactgttggaaggtggggccttttgggagggccttttggcagagccggcacgaatggattaatgtcattataaaaggacttgatggaaagagttcatcccttttgcccttccactccctgccacgtgaggacacagtgttcctcccctccagaggatgaagcaacagatgccacattggaagcagagaacagccctcaccaggcagtagtgccttgatctcaggttttctggcctctagaactgtgagaaaagacatttcttttcttttttcttttttttttttttaagacagagtcttactctgttgcccaggctggagtgtagtggcatgatcttggctcactgcaacctccgccttccgggttcaagcgatttccggctaatttttgtatttttagtagggacggggtttcaccatgttggccaggctggtctcaaactcttgacctcaagtgatccgcccgcttcagcctcccaaagtgctaggattacaggcatgagccaccgcgcccgcctcgttttgctattcttcaacttcgcatgtttggattgctacagcttgaggtctttagtgtctggtttccttcgctcccttccacggttctaagattgttttctgcatcctccgtacccctccctcggtgtcttcctgctgggaactgctctttctgtctgccacgtggtggccacaagggggcagcagaggctgaggaaaatctggtgagaccaggttgggggccttttcccgggcccacgagttactcccccccgcccacggagcaccttctgtccgggcgcctcccaggccgctgctgcttcttggttctgcttccttttctgagacccgctgctttagagaagatttctggagcagagatttggagcaaggatctccaaactcttttgatcacacactccattcagtaatatattttgaacatgcagctaacaaacatgtgcaaacataatgcaggttgaaagaacaaacgcaaatcacattaaaagggcataagattgaagattttataatagttctaatatgttctctgccttctttcctgtctctccagatccctggaggacccctagggctggtgcccctaatctggtggccccctgtttagagctcaactgagctttgatgtagacctggcccctgttagggtttggccacacgacctgtgaccctgggcaggtttcctcagatcatcgaggctctgtctctcagctgtaaagtgaggacagtaaggaccatctcatggtattaagctaaaacattcacggaaataaatatgtaatgctcagagtaagatgccacctagtgaacagtgggcctgagtatttggtggtggtcattagagagcagaggcgctggcctcagggttcagcccacagttctgcctgtggagaggagactcagtgacaagagagaaaaaagtgtccgacatcctggggactgagaatctgcctctcagggttggacagggcagggcctcttctgcctccagcaccccaggcctctctcctctgattctatcagggacggaggccaaggttggagacccctaggccttttcacctaacttggttttcagattcctcccactaggacttgtgtgtttcagccttaaccatggatgggcctgacctacacgggattgagagggtcagtaaattcgtccccaccactgactgggtcacctacctgggcagtacacatgctgctctcggcaactgtttcttctcctgacacttatgattttatatacaaattgttggaagttatgtcgtaatatagtccttttggtaagagtatatatggtcaaggatactgtgactgaatttgaagagtaaataatacagctgtgtattgagctatataatgactagggctctctttattttggggacagagtgagaacttcttcacttataaggtggctttgtcttgattggtgaaaatagagaattatttcattgttgtataaaagttcaggccgggcacggtggctcatgcctgtaatcccagcaccttgggaggccaaggcaggcagatcacctgaggtcgggagttccagaccagcctggccaacatagcaaaaccccatttctactaaaaatacaaaaattagctgggtgtgatggtgggtgcctgtaatcccagctacttgggaggctgaggcaggagaatcgcttgaacccaggaggcagaggttgcagtgagctgagattgtgccactgaactctggcctgagtgacagggcaagactctgtctcaaaaaaaaaaaaaagttcaaatatgtgtaatatgaaaactgtgcagccaaaggtgtgactggtgctcaatattattttattgcatctttgttccaaatccactccatctttgtcctgccttgtggttctggagctggaccctataaacatttcttctttgccattgggcacaacgttagactttgacagtaaattgcactggaaggaatactgcaagacatagcagagaaaacagcttcattctagttctggtacttttttttgagatggagtctcactctgtcactcaggctggagtgcagtggcgtgatctcggctcactgaaacctctgcctcccaggttcaaacgattttcctacctcagcctcctgagtagctgggattacaggtgcacaccaccacacctggctaattttgtatttttagtagagacagggtttcaccatgttggccaggctggtctcgaactcctgacctcaggtgatctgcctgccttggcctcccaaagtgctaggattacaggcaggagccaccgcgcctggcctgccaggctttcttaatatgccctaccaccatgaaacttatattgggggggagactcagataggggccaatgggggcaagtttgagccttgccaggttgatacttgggcactgagcagagtgactagtgtctgtgttttgacatgtgtgtataactcctgttggaatgggaaatgttaatttagttcccccacacaacctgttgggctgcctcttgcaaaactggggccttttgcctgtggttccatgaaaagaaaaggaatgtttttcttttgtaacgtggcttggcccccacagctacggtgcagcaagcagggtcatcaaaagccactctgctcttctggaagcagctgagaaagggaagccataaacctgacaagctggtaaaaagctaatttcttaccagctagcctctggcctttctctctctgtgcaaatgagttgagtgaacaataaaagtcactgtttgtctcctctgcaaagttttgattaatagggaagaagatttgtgtgactagtcttaggttgtagtgaatcttgtgtacttttgctactttgaactataaatatttgtattgtttggccccttctcagaaatcaccttttttgccatcttcctttgtctttgcctttttgtgtcgttctgtcatggagaaggataccataggatagaacacaggcctaggatccctgtaagcctgctgttcaagccagccctgcagactggtcggttacaaactttgctgcaggtccttggaacaaaaactggatgagatttccctggtcttgttttatgtggttgagagcttgactttgtaaccatgtaggggtactctctctcttgatctctgccatctggaggatggaaattcttgggttcaagtcaggtggctggtctgagaggactgggagtctgagacacattagcatactcttcgtcctgaatgtgtcgagcccttaggtgagttttgtcttaaaacgtcccatctctgctggttggatttattaggacaaaaaaacagtcctatctctacaggacttttgttgtattttgctatcttaaacccatttccaagagggaatacttggggatgcctcctctaggaatacttcttgctgcttatatggcaaaaacctggaaaattaccatctgcaatttaaaaaaggtgtttgagtctctattggaactaagtacaccattgaaagaaaaaggattttagagatctcttatctaaaacaattgaaggaaggttaaacagtagtgtcgtgggtagccttaaaaattctcttgagcagttaaaatcattcgcaagcttgaaaatgactgctctagattctttctgggaagagcactggcaaccaccctatgctgtagcacagtagctaaatctctgccctttcactatggtggcctgggatcacttcccagcttagggaatgcgtcctttctggttttgtatttgtgggactttttgccattcattgatggacagcttctgatttcctgtcttgaattttccttgctctgagatacctttggggtgattctagatcttgtaaaaaactgcttggcatctctttggagataccttgtgcatctgtggttaagtcataaccctagttaaggctcattggtttcaggtgggaggttatccttggtagagagttcaaaagccagaaatatcagctgtttgttccagctaaaaactggtaataagagatctgaaagaattttcttcaagagctctatagttaaaagtcaacttaattaaaactgatttagaatatatgtgtacagatattgttttaaagcctctgctctctctctgtaaaaacatcttaagcaactgaattctgtctgcttaaattttaatcttggtatgtaaaagctaggaaagaaatatacttttagagatggctattgacgttgtttacagtgaatagttattactacagggtggtactgctttttttttgcacatttagataagaaaagcatgctttcgggcacctagaaggtatggaatgagggttaagactcccatggagcattaagtgattacagaataggctgattgctatagggttgcccaccagcctcaggggaatgtccttgcagtgaagtgcaccgtaaaagcattgcactgtcttgtcctgcggtgttctcctctcttgaggacccaggattcagtgtaaaagttggatccttaactttggagatctattttgccttccagctgtgcctgcttattaggccatagaaactgcatgctttcctggccctgttccttaaagggctccaccctaaagccagtaattcaattaagaaactaacatctttaaaaaaatttcagtgggcaagtgtgtctgttttcctaaccatcttttttctttttcttcttttgagacagggtcttgctctgtcacccaggctggaatgcagtggtgagaacatagcttactgcagccttgacctcctgggctcaagtgatcctcccagctcagcctccccagcagctgagaccactacgcccagctaatttttgtatgtttttgtagagatggggtcttgccatgttgtccaggctggtcttgagctcttgggctcaagtaatcctcctgccttgacctctctaagtgctgggattacaggcatgagccaccacacacagcttcctggccatcttaactgaacttttactcataccatttttccttggtttaaataaaatatgaattttctatttcatttcacttaagaattgtgcctttagaaatgcagatttggagtggcatagctgacaattatttagggcagggaacaggtaatcaagagaaggtccaaaatgaggaagagaaactttaaaaactggcacatgaagaatcttacaaatctataaaatctgcttctgtgtgtttgtatgtctgtgtgtttatacatatcatgtgtttgtgatattttcactaccaaaatatatgaaaaagctgtaattaatggcttttagaaaaataagcacttaaatattttatcagagaaatatatatatgtatatatatatacatatatatgtatatatatatacatatatatatgtgtatatatatatatacatatatatattttaatacagagtctcgctctgttgtcaagctggagtgcaatggcgcaatctcggctcactgcaacctccacttcccgggttcaaacaattctcctgtctcagcctcctgagtagctgagactacaggtacacgccaccatgcccagctaatttttgtatttttagtagggccagggtttcaccttgttggccaggatggtcttgatctcttgacctcgtgatctgcccacctcggccttccaaagtgctgggattataggtgtaagccactgtgccaggccgagaaatagaaattttaaggccttttagttcatgtgacttcagtgatctttggtaaataaagatggttttaaagattattaataaaatcaaataacatcttcaaaatgtatgcatttggtctaaattagtcaaaggttttgcaaggctacatcaaggatgcagttatattattgggcctaagccatagggtgaaagatatggcccaggtagagagtgagagtgaaaagaggtcagaaccttggggacatcatcacttaaggaagaggagcttcccagggacaatgaggaccactacatgggaggcaggatgcttcaaggcacagaatagtttgaatcataaaaggcttcctacctccaggaaaagggaagagcagtgtagttaatatttagatttactttgcattgcatttaatggaaaataaaggggaaaaaaatgtatcttgttagtcctatatcatctgtgctgtggttagaaagattaaaatgataagtcttttcaagaagtggggggatagccctaattttggcaggccataagacatgtagtgtcttctagaactaggggaagaattaaggccaaccagcatcaagaaaaataagcaccttgtttactgggtttagtatctgagtcgttttgatgctttagttggaatagaaaccaaattgaaaagtgcaatcgatggcgaggaagtaaagagtatggacatgattcctctgaaaagcttggttataaagaaaaggtgcaggccgggtgtggtggctcacgtctgtaatcccagcattttgggaggctgaggtgggtggatcaacgagggcaggagtttcagaccagcctgaccaacatggtgaatccccgtctctactaaaaatacaaaaaattagctgggcatggtggcacgtgcctataattctagctactcagtaggctgaggcaggagaattgcttgattctgagaggcggaggttgcggtgagcttagatcgcaccattgcactccagcctgggtgacagagcaagactctgtctccaaaaaaaaaaaaaaaaaaaaaaaaaggtgagaataataggatattttgaaagttttttttttcttttttgaagattggagagtcttgactgcattcatatgtgtttgaggggtaaggtatgggcatgggaaataggaaagaggttgaagatgaagtatggacttctgggagacaggagatgatggaatctagagcaggatactcaaaggatgatccgcaaatgggtggcactggcatcacctggaagcttgttagcaatacaaaattgttagacttcatcacagatacagtgaattagaatctgtgggtgtagggctttagcaatcaccaggtgatttggatacatgctcaagtttgaaaatcacttggctagagcacaggtgaagggaaaaactttgtatggaagcaggaatgctacttccactgagatatgagagaaggatgtgaggatagatctctggggcaattaatagagttgtgagtaatttaattttctctgtgtgtgtgtgtgtgtgagaaatattcaaaataataatgtcttttcaagaggtgggggggatggccctaattgcggcaggccataagacacgtagtgtcttctagaactagggaaagaattaaggccaacagcatcaagaaaaataagaactttgtttactgggtttagtacctgagttataatacaaaattgttagactttatcccagatacagtgaattagtatctgtgagagtggggctttaggaatgtaccaggtgattttgatgcatgcttaagtttgagaatcacttggctagagcacaggtgaagggagaaaatttgtatggaaaatctgtatggaagcaggaatgccacttccactgagatatgagataagaatgtaaggtatgatcctctgctgagaatgaggactaggaagtggtttaagaatatgcctgaaggtctgcaaaagctgccttggtcaatagaaggacatgcttaagtgagcatgttggaggctcagaggaacatggagctgaagaattgggagtccaacatgcagactttttaatcttctgacaactgagagggcagagttaatttgatctagtaaggggatgtttgaattgtgggtgcaactgaattgactgatcatggtttaggctagaaagtttcaggtaatgtagtcggtaagggaaggaagctgactgactggaaacaaaagggggaagtgcctgaaggtactagtgaggtcaaagaagaaaggcagtgggaactctagagcactagagctgcaaagatattgggttttggttagagagtgagatgctgatgtgtaaggtttcagaagggacctcttagtctcattaaaatgcaaagaaagtatccagtaacaaaggcagagttcaaaacaaggaagaacttggaagaacagagacaattcagaagagactttaaaacacaactataatcaatgagaaataaaagcaggtatcacatctatgaaagaacaagatacttaaacaagggaaggattaacaagtaaacagctcctgaaaacttaaaatatgagagctcagaataagtatttaataaaggtttgggaaggtaaaggagaagaaatatcccagcaagtataacaaaaacataaaaacataggcaataggaaaagcaaagatgtgaaaatagaggattgagtttatatcagttacttcattaaactttcctattatttatagtaatttgtctttagattaatttgtctttagattctatggtgtaatcatgtcctctgtaaatgttgacagttttatgtcttcctttccaatcttttggtttctttttcttatctcattatgctggtaatgaccaaaatacaatgttgaataaaagtgatgatagtagtctccttgtcttcataattttaatgagaatgcatcccaactttctctttttggaagatgtgtttcagaataaaaaaaaatagataccctttatcaggttaaagaagttctcttctattcctggtttgtttatttatttatattatttatttatttgagatggagttttgctcttgttgcctaggctggagtgcaatggcatgatctcggctcactgcaacgtctgcctgctgggttcaagagattctcctgcctcagcctcccaagtagctgggattacgggcaggcatcaccatacccagctaattttgtatttttagtagagatgggggtttcaccatgttggccaggctgatcttgaactcctgacctccggtgatcagcccacctcagcctcccaaagtgctgggattgcaggtgtgagccactgcacctggccttattcctggtttattaattgtttttttctttaagccagggatgagcaaactaccacccaatgggccaaatccagtctgcaacttgttttttttttgtatagcccatgagctaagaatgatttttacatttcatgtaaaatgtcacataatattttgtgacatgtgaaaattatatgaaattcaaatttaagtctccataagtaaagctttattggaacatagccatgttcttcattcatttatgtattgtctatgactgcttttgtgctataaaggcagaggtgagtagttgtgatggagcccatagggacctacaaagccaaagtaaacatttggccctttatagaaaaagtttactgattcttgttttaagtcaaaaatggtattgggggaaagttaggttcatggatgtgcagaccaagaataagggaaagatctcagccctaactccttcttatacagattttcaataggtccatctttttcaggtttaccctcttaccctagactttcttagtttttagctttccatttctagagatttagggctctgtctaaacagtggttttccttctgtgtagcatttctttggatgcacaataggttccactttcatcagctccgcttttcaccagttttccagaaaagcattacagtctgttgctgttccctgttccccttgtctgcctgattatttattttcagagtcattttagcagtgtttggggagggagttataccttttattcctcaggtatcaccactcttctcttcctaccgcgaaacagcacagtgaaagggaggagatggagtgaagagaccgagggcagggagagggaggggggtgtgacggggtggggaagtgaggaggaagagggggaagagctactggggaggaggaagatgggggaggaagaggatgatggggtggggtggttcagggagtgaataggccgggttgggtgagatgaggctgggtgtatgtgcttgaggagtccgggagtgcggaggggcagaaaggtagacagtgcgtgcgggaagaggggatgggggtggggaggcgagggcggtcagtgggttgagaggagtggggagaagatttagggcgagagaggtgccatcgtgctggggaaggcgggactaggagaggtaaaagaatggggagagaaatgggagggagagaaggaagctgagggagatttgaggagagaaggcgcttgagggggaaccaggaggggagaaggcttgtgagggggaaatgtgagaggagaaggggcgcgagggggaaccgcgaggggagaaggggcgcgagggggaacagcgaggggagaaggggtcccgcctcctggccgcgccgccctaggtgtcgccgcctggcggttacgaggaggccgcctcctgcttgccggcctggcggtcctactcaacaccgcaagatttcaaaagggaaattcctccagggctgagtcacagggaagaaagcgatttcctccgcctcttccaaagcggtaggtttccttcctccgcctgcctcttaaataacgtggtatctcgcagtttggctgaaacctgaactaaatgcaatgcttttttgacttttactttctcccagaacaacagttgtgatatgatctgttttggggcccttcctgcgctccgccctgggccagagtatgtaaagctcgtgggtctctgtgtgtgtctgagcagctgctctgccaagactccacacagctgtgtgtgtgtcggacccaaggccttggtggcatgggctcatgagggaatctcctgatccaccagtcgcaaagatccatgggagaagcatggtttcctgaggtcgcaccatcactcacttcttcccttggctgggagtgggggttcctttggctctgtgtcgctcccaggggggctgtcgccccatccagcttttctttgttctctgtgggtcgagttgttttcctgatgagtcccaatgcaagtacctggatatttcagttgaagatgctgtattcacttgcctcttttgttcctctctgtgagtgctgtggaccatagctgtttctaatcagccatcttggcctggcaatctacagtagtaaatgttaacattggatagtgtgattcttcctactttactattctttttaaatattgttttagcaatttttgttcttttgactttacatatagattttaggaccagtttgtctatatctacaaaaggaagcttttgataggaaatgtgttaaacctatagaccgatttgaagagaattgacatctttgttgtcttccagttaaatgacactgcatgtctctccgtttgtttagatctatttttattttttcatcagcattttgtagttttcagcctgctgattctgtacatattttgttagatttatacttaaatatttaattttctttggagtggttgtaaatagtactgtgcttcagttttggcttcctactttttattgctagcatagaggaatacaattgattactattctgtaacattgctaaaaatgtgtttgaagtttcctcggagtattatctctggatataagcttctgggctgataggtcttattttttagcagttgaaaaatgttgtgctactttcttcctgttttgggttttttggtgagaaatccactgtaattctaattgttgttctcctataaataatgctttttctttcagaatgttttcaagatttttttaagttttcagaaatttgattatgatgtatctgagcatagatttctttgagtttattatattagaagttgctttagctttttgaattacacatttatgtctttcattaagtttgagaagtcttcaatcattattttgttaaaaagttttttcagaccagcctgggcaacatgacaaaacactgtctctacaaaaaaaataaaaaaaattagctggtcatggtggcatgtgtcagtggtcccagctactcgggaggctaaggcaggaggatcacctaagcctgggagtttgaggctgcagtgagctgtgatcatgccaccgcactccagcctgtgtaacagagtgagagcctgtctcaatttttttttttttttagcaccctatgccgtctccttctgtaattccagtcacaggaatgttagagactttgttattgtcccacagatacttgttgctctgttcgttttttcttttctttctttttttttttttattatactttaagttctgggttacatgtgcagaatgtacatttttcttacataggtatacatgtgccctggtggtttgttgcacccatcaacctgtcacctatattaggtatttctcctaatgttatccctcccctaactccccactctctgacaggccccggtgtgtgatgttcccctccctgtgtccgtatgttctcattgttcaactcccacttataagcaagaacatgcggtgtttggttttctgatcttgtgatagtttgctgaaaatgatggtttccagctttatccatgttcctgcaaaggacacaaactcatccttttttatggctgcatagtattccatgatatatacgtgccacattttctaaatccagtctatcattgatggacatttgggttggttccaagtctttgctactgtgaatagtgccacaataaacatgtgtgcatgtgtctttactatagaatgatttataatcatttgggtatatgcccagtattgggattgctgggtcaaatggtatttccagttctagatccttgaggaatcgccacactgtcttccacagtggttgaactaatttacactcccaccaacagtgtaaaagcattcctatttttccacaacctctccagcacctgttgtttcctgactttttaatgatcgccattctaactggtgtgagatggaatctcattgtggttttgatttgcatttctctggtgaccagtgatgatgagcatttttttcatatgtctgttggctgcataaatgtcttcttttgagaagtgtctgttcatatcctttgcccactttttgatgggttttttcttgtaaatttaagttctttgtagattctggatattagccctttgtcacatggatagactgcaaaaattttctcccattctgtaggttgcctgttcactctgatgatactttcttttgctgtgcagaagctctttagtttaattagatcccgtttgtcaattttggcttttgttgccattgcttttagtgttttggacatgaagtctttgcccatgcctctgtcctgaatggtattgcccagattttcttctaggagttttatggtcctaagtcttatgttgaagtttttgatccattttgagttgatttttgtaaaaggtgtaaggaaggggcccagtttcagttttctgcatatggctagccagttttcccaacaccatttactaaattgggaatcttttccccattgcttgtgtgtgtcaggtttgtcaaagatcagatggttgtagctgtgtggtgttatttctgacgcctccgttctgttccattggtctatatatctgttttggtaccagtactatgctgttttgggtactgtagtcttgtagtatagtttgaaatcaggtagcatgatacctctagctttgttcttcttgcccaggattgtcttggctacgcaggctcttttttggttccatatgaagtttaaagtagtttttttccaattctgtgaagaaagtcagtggtagcttcatgggaatagcattgaatttataaattactttgggctgtgtagccattttcatgatattgattcttcctatccatgaacatggaatgtttttccatttgtttgtgtcctctcttatttccttgagcagtggtttgtagttctacttgaagaggtccttcacatcccttgtaagttgtattcctaggtattttattctcttagtagcaattgtgaatgggagttcactcatgatttggctctctgtctattattggtgtacaggaatgcttgtgatttttgcacattgattttgtatcctgagactttgctgaagttgcttatcagcttaaggaggttttgggctgagacgatggggttttctaaatatacaatcatgtcttctgcaaacagagaaaatttgatttcctctcttcctatttgaatactctttattgctttctcttgcctgattgccctggccagaacttccaatactatgttgaataggagtggtgagagagggcatctttgtcttgtgccggttttcaaagggaatgcttccagtttttgcccattcagtatgatattggctgtgggtttgtcataaatagctcttgttattttgagatatgttccgtcgatacctagtttattgagagtttttggcatgaaggggtgttgaattttatcaaaggccttttccgtatctattgagataatcatgtggtttttgttattggttctgtttatgtgatggattacatttattgatttgcgtatgttgaaccagcctcgcatcccagggatgaagccaacttgatcgtggtagataagcttttttatgtgctgctgcattcggtttgccagtattttattgaggattttcacattgatgttcatcagggatattggcctgaaattttccttttttgttgtgtctctgccaggttttggtatcaggatgatgctggcctcataaaatgagttagggaggagtccctatttttctattgtttggaatagtttcagaaggtatggtaccagttcctctttgtacctctggtagaattcgcctgtgaatccatctgctcctggggttttttttggggtagtaggctattaattactgcctcaatttcagaaattgttattgctttattcagggattcgacttcttcctggcttagacttgggagggtgtatgtgtccaggaatttatccatttcttctagattttctagtttatttgcatagaggtgtttatagtattctctgatggtagtttgtatttgtatgggatcagtggtgatatcccctatatcattttttattgcatctatttgattcttctctcttttcttctttattagtctggctagtggtctattttgttgattttttcaaaaaatcagctcctggattcattgatatttttgaagggttttttgtgtctctatctccttcagttctgctctgatcttagttatttcatgtcttctgctagcttttgaatttatttgctgttgcttctctagttcttttaatttcgatgttagggcatcaattttagaactttcctgatttctcttgtgggcatttagtgctataaatttccctctaaacaccgctttaaatgtgtcccagagattctggtacattgtgtcttcattttcattggtttcaaagaacatttttagttctgccttcatttcattatttacccagtagtcattcaggaacaggttgttcagtttccatttatttgtgcagttttgagtgagtttcttaatcctgaattctaatttggttgcactgtggtctgagagactgtttgttatggtttccattatttcgcatttgctgaggagtgttttacttctgattatgtggtcaattttagaataagtgcaatgaggtgctgagaagaatgtatagtctgttgatttgaggtggggagttctgtagatgtctgttaggtctgcttggtccagagctgagttcaagtcctgaatatctttattttctgtctcattgatctgtctaatattgacagtggggtgttaaagtctcccactattattgtttgggagtctgggtctctaagaacttgctttatgaatctgggtgctcctgtattgggtgcatatatatttaggatagttagctcttcttgctgcattgttccctttaccattatgtaatgcccttctttgtctcttttgatttttattgatttaaagtctgttttatcagagattaggattgcaactcctgctttttttttgctttccatttgcttggtaaatattcccccatccctttattttgagcctatgtttgtctttgcacatgagatgggtcttctgaatacagcatactgatgggtcttgactctttatccaatttgccagtctgtgtcttttaattggggcatttagcccatttacattaaggttaatattgttatgtgtgaatttgatcctgtcattatgatgctagctggttgtttcgcccattagttaatgcagtttcttcattgtgtcaatgttctttacaatttggtatgtttttgcagtggctggtaccagttgttcctttccatgtttagtgcttccctctggagctctcgtaaggcaggtctggtggtgacaaaatccctcagcatttgcttgtctgtaaaggattttatttctccttcccttatgaagcttagtgtggctggatatgaaattctgggttgaaaattcttttctttcagaacgttggatattggcccccactctcttctgtcttatagggtttctgcagagagttcggctgatagtctgatgagcttccctttgtgggtaacccgacctttctctctggctgcccttaacattttctctttcatttcaaccttggtgaatccgatgattatgtgtcttggggttgctcgtcttgaggattatctttgtggtgttctctgtatttcctgaatttgaatgttggcctgtgttgctaagttggagaagttctcctggataatatcctgaagagtgttttccaacttgattccattctccccgtcactttgaggtacaccaatcaaacgtagatttggtcttttcacatagtcccatgtttctttttttttttttgagatggagtctcgctctgtcaccgaggttggagtgcagtggtgtgatctcggctcactgcaagctccaccttctgggttcatgccattctcctgcctcagcctcccaaatagctgggactacaggcgcccacccccacgcccagctaattttttgtatttttagtagagacggggtttcaccatgttagccaggatggtctcgatctcctgacctcgtgatccacccacctcagcctcccaaagtgctgggattacaggtgtgacccaccgcgccccggcaagtcccatatttcttggaggctttgttcgttcctttttattcttttttatctaatcttgtcttctctctttatttcattaagttgatcattaagttgatcttcaatcactgcttcatcagtttggctattgatacttgtgtattcttcatgaagtttttgtgctttgtttttcagctccattaggtcatttatgttcttctctacattggttattctagttaattcgattaacctttttttaaggtttttagcttctttgcattggcttagaacatgcttcttgagcttgtagttttttgttattacccaccttctgaagcctacttctgtcagttcatcaaactcattctctgtccagttttgttcccttgctggcgaagagttgtgatcatttggaggaggagaggcattctggtttttggaattttcaaccttttcatgctacttttttcccatctttgtggatttatctacctttggtctttgatgttggtgaccttcggatggggtctttgagtggacgtgctaatcctttctgtttcttttccttctaacaggcccctttggtgccagtctgctggagtttgctggaggtccactcctgaccctgtttgcctgggtatcaccagcagaggctgcaaagcagcaaagattgctgcctgttctttcttctagaagcttcgacccagtggggcacctgtcagatgccagccagagctctcctgtatcaggtgtctgtcggtccaagctagaaggtatctcccagtcagtatacatggggatcagggacccacttgaggaggcagactgacccttagcagagcttcaataccatgctgggaggtccactgctctcttcagagccatcaggcagggacgtttaagtctgctataagcccccgactggggttgctgccttttttacagagatgccctgtccagagaggagcaatctggcagtctggccacagcagccttgctgagctgcagtgagctctgcccagtttgaacttcccagcagctttgtttatactgtggccataaaaccatctactcaagcctcagcaatggtggacgtctcttccaccaccaagctcaatcatcccaggtgaatctcagattgctgctgtgctggcagcaagaatttcaagccagtggatcttagtttcctgggctccatgggcgtgggaccagccaagccagaccacttggctccctggcttcagcccctctttccaggggagtgaacggttctgtctcgctggtgttccaggcgccactggggtatggaaaaaagaaaaaaagctcctacagctagttcagtgtctgcccaattggccacccagttttgtgcttgaaacccagggccctggtggggtagtcactggagggaatctcctggtttgtgggtttcgaagactgtgggacaagtgcagtatctgtgctggagttcctcaggctcagaccctcatggcttcccttgggtagaggggaaaattccccgaccccttgcacttcccaggtgaggtgatgccccaccctgcttcggcttgccctccgtgggctgcacccactgtccaaccagtcccagtgagatgaaccgtgtgcctcagttggaaatgcagaaatcacccaccttctgcctcgatctcgctgggagctgcagactggtgctgttcctattcggccatcttgaatcttgcctgttcatttttaattttttctttcagtgtattttcctctcagttcaggctggaaaatttcaattgctctatctttgagttcactgattgtttcttttgtcatattcattctgttattgaatccatccagtgagttttcattttggttattttattttccagctataaaatttccatttgcttctttctttctttttttttttagaaatgttcatctttttattttaagttccggggtacatatacaggatgtgcaggtttgttacataggtaaacatgtgccatgggtagtgttcatctatagctctatcaatgcttcttgtctttaagtctaccttgtttgagagctatgtcagcattctttttttttttaattatactttaagttctaggatatatatgcacaatgtgcaggttagttacatgtctatacatgtgccatgttggtgtgctgcacccattaactcgtcatttaacattaggtatatctcctaatgctatccctcccccctccgccaaccccacaacaggccctggtgtgtgatgttccctttcctgtgtccatgtgttctcattgttcaattcccatctatgagtgagaacatgtggtgtttggttttttgtccttgcgatagtttgctgagaatgatggtttccagcttcatccatgtccctacaaaggacatgaactcatcattttttatggctgcatagtattccatggtgtatatgtgccacattttcttaatccagtctatcattgttggacatttgggttggttccaagtctttgctattgtgaatagtgccacaataaacatacgtgtgcatgtgtctttatagcagcacgttttataatcctttgggtatatatccagtaatgggatggctgggtcaaatggtatttctagttctagatccctgaggaatcgccacactgacttccacaatggttgagctagtttacagtcccaccaacagtgtaaaagtgttcctatttctccacatcctctccagcacctgttgtttcctgactttttaatgattgccattctaactagtgtgagatggaatctcattgtggttttgatttgcatttctccgatggccagtgatgatgagcattttttcatgtgtcttttggctgtgtaaatgtcttcttttgagaagtgtctgttcatatccttcgcccacttgttgatggggttgtttgtttttttcttgtaaatttgtttgagttcattgtagattctggatattagccctttgtcagatgagtagatgcaaaaattttctcccattctgtaggttgcctgttcactctgatggtagtttcttttgctgtgcagaagctctttagtttaattagatcccatttgtcaattttggcatttgttgccattgcttttggtgttttagacatgaagtccttgcccatgcctatgtcctgaatggtgttgcctaggttttcttctagggtttttatggttttaggtctaacatttaagaggatacaaacaaatggaagaacattccatgctcatgggtaggaagaatcaatatcgtgaaaatggccatactgcccaaggtaatttatagattcaatgccatccccatcaagctaccaatgactttcttcacagaattggaaaaaactactttaaagttcatatggaaccaaaaaagagcccacattgccaagtcagtcctaagccaaaagaacaaagctggaggcatcacgctacctgacttcaaactatactacaaggctacagtaaccaaaacagcatggtactggtaccaaaacagagatatagaccctcagaaataatgccacatatctacaactatctgatctttgacaaacctgacaaaaacaagaaatggggaaaggattccctatttagtaaatggtgctgggaaaagtggctagccatatgtagaaagctgaaaatggatcccttccttacaccttatacaaagattaattcaagatggattaaagacttaaatgcttctttcttatattttatatttgttgctaagatgttccattaaaaataatttcgaagttattcataattgcttgttggaacattttttatgatagctgctgcaaaatacttgtgagataattgcaatacctgtgtcatcttggtgttgacactgtttgaattttcttatttagatttttgtggttcttgataatgacaggtgattttttgtttatatgttggacattttgaatatggtgcattgaggcctggtttctatttaatgtttctgttttagtaggcagtcaacttgtttaggttcagaacacatgtcttgacccatgtttatgggccatgatgcaaatgttaatttagtgttcaaagtctttatggtgctattctggcttgtcctacttgtgtgctacttagaggtcaatctgaagcctggtgatgtttcacatcactgttaagttctcaggttttgtggatgtcatttctgatcagtttttaaaatttttttaaaattatttatttatttttgagacagagtcttgctctgttgcccagactggagtgcagtggcacgatcttggctcactgcaacctctgcctcctggattcaagtgattttgcttcctcagcctcccgagtagctgggactacaggtgcgcaccaccacacctggctaatttttgtatttttagtagagatggggtttcaccatgttagccaggatggtcttgatctcctgacctcgtgatccacctgccttggcctcccaaagtgctgggattacaggcatgagccaccacgcccggcctatttatttatttatttatttattttgagactgagtgcaaaagtgtgtcacccaggttggagtgcaatggcgctatatcggctcactgcaacctccaccttctggattcaagtgattctcatgcctcagcctccgaagtagctgggactacaggtgtgtgccaccacgcccagcctctgattagtttcttacatgtactgctcacaagaatttcatacacagattcagaatattcctttctcttttttctgtaatcttaccagccccacatactttagttgggatagagaagaaactgccttgtgattgcagggcaggggttctgcaccctgtctctacagctgctgcaccagataccttttgattcagaaattacttttttggaaatttaacttcaggaaaaatttagataaatgtgtaaagagacatacatttactgtagtgttggtttaaatgaaaagataaagtccacctacaggggagtgtttaaataaattatgcactgattaaatattatatagatacatattattatggaaaaattttcatggtatattgagtgaaaagatgcaggtatgtaagtttgaaatctacttggaaaaatgaagtatctatctgtatgtatactcaggcattgaagaaagttaatgatttaacttaaatgttaatagcagagtcattttaagggatgaggatggttatagtaattttcacttccctcttttttttttttacattttttagtattgtatgtttttaaatgaccatgccttgctttgtattcaaaataaattacaaactctaatttgaacaaatcagatctagtcacttatctgatgaccagtacagttttaatcttaataagtcttctattgccagtcatttgattcttgtatcttatgctgtcctgcctgagagtagtcctaccaaaaccagttttatctgaggtttttcttttcccttttttttttttttttagaattgctttcctgtagaggagaaggattgagacatgacctttggtgaaactgaaggtataacttgaataatattcgttaatctggggagaataaaattttgaaagaagaaatttaattttgatgctcttctttaaaaccaagggctccacattgtctgtaagataaataattaaagctttatttactatggcattcaagggacttctcaattgggccccaatctacttttctgatatcatttctgatactacttttcacttatagtccagcaaggcctgtccactcactctcgttagacccttcatgctgtcctacctctgggcattggctcatattcactccttggaatagacttgatttcaccttttaaaatccacttttatttgcttcatctaacttatgacttcttcaaagcagatcaaatatcatctttttgtgaagtatcccagcactctattagggtgaaattatcattcctcctgtaatattttgttcctaagctgtttgttactgtatatgatagttgtttacttttttcctcttaagactgagattctttcagtaatttttgaatgattttcatgaaccagctaagcttaactctggagaaacaaagacgaaaaacatctggtttctcacctccaggtgcacagaatctagtaaagcgggtaaacgtataaacagagaataattgaggtatataaaagtggtttgggaactgtgttgagggcagtctcccttagtaggtgtttaggaagactttacaaatgagatgacatttgacctgaatcgcaaataagtaggagcttgtcggatggataaaaggtagaatgtgagtccttttaacacctagtcaaaagtgattggatggtggttagttttaatgtaatttttcttatttagtgtatgaagatgtccataagttacaaagcagtgtggtttcatcagaattgccactggaccacagggtacttcatatgataaagaagatgtttctttccacagtcattcagtccaccattgaatagatctgaaaggtgtaaagttcactgatatgcatctgatttctttttttcttttttttttttgagacagagtcttgctctgtcacccaggctggagtgcagtggtgtggtctcgactcactgcaagctccacctcccaggctcacgccattctcctgcctcagcctgtcatgtagctgggactacaggtgcttgccaccatgcctggctaatttttttttttttttttgtatttttagtagagatggggtttcactgtgttagtcaggatggtctcgatctcctgacctcgtgatccgcctgccttggcctcccaaagtgctgggattccaggcgtgagccaccccacccggcccatttttttcttttcaacttttcttaggctggacagacacatttcagtgattggcaaagcacctcattaaacttggctgctataatttttcttcttttttcatctcattttctattctctcattttatttttgcctttgtttaatctactctttgttggtttggaagttccttctgtttttagctgataaaaatctacgactaatctcagataattttattatttttcgttagtcattttgctattcaggggtgttttcttttttttaaaaaatagacttaatagacttaaatagatagttattatttggaatggactacatccaaacaattatgaggaacaattgtgaggaactcagttccagaaacttttgtatccagtaactgataaatagataagtaatgtactaatggaaaaaactcgatcaaataataaaccaaagtcaatctttttttttttttttcccctaagatggagtcttgctctcttgcccaggctggagtgcaatggcgtgatcttggctcactgcaacctctgcctcctgggttcaaacaattcttctgcctcagcctcccaagtagctgggattacaggcgtgcaccaccacacccgtctaatttttgtattttagtagagatggggtttcaccatgttggccaggctggtctcgaactcctgatcttgtgatctgcccaccttggcctcccaaagtgctgggatcacaggcgtgagacactgtgccctgccaaaaattttttttttttgagacagagtctcgctctgtcatccaggctggaatgcagtggtgcgatctcagctcactgcaagctcaacctcccgggttcacgccattctcctgcctcagcctcctgagtagctgggaccaaagacccctgccaccacgcccggctaatttttttgtatgtttagtagacacaaggtttcaccgtgttagccaggatgatctcaatctcttgaccttgtgatcgcccatctcggcctcccaaagtgctgggattacaggcgtgagccaccgcgcccagcccaaagtcaatgttttgaccaagagcaaggctaccacttgttattattaattaattaattaattaattaatttttgagacagggtcttactatattgcctaggctggcttcaaactcccaggctcaagtgatcctcctgccctgcctcctgagtagctggaattacaggtgcgtggcgccatgccttactatttatttctaaacacattgcagaacatggaatttagggaggacaaattttgatgaatcaaataggtatagtgatatgggtagaagattggtttactttatcataattccttaaatacatattgtgtacttgattaatgaaatgttaaaaataaatgcttagatatcatttgacattaaataactcaatcactaagcatgaactccatatttaaaaactttataaaattttcagagctcacacagacaaaattccttattgtcatgatcactacgtataagtttgagttctttcttactttttttttttgagacagagtttcgctcttgtcgcccaggctggagtgcaatggcgtgacttcgactcactgcaacctctgtctcctgagttcaagcgattcttctgcctcagcctcccgaagtagctgggattacaggtgcccgccaccacacccagctaatttttttgtatttttagttgagacggggttttaccatattggccagactggtctgaactccttatctcaggtgatccaccttatctcaggcgccccccgcgatgcggggagtgagagccagcccctcttcccttgggcctcccaaagtgctgggactacaggcatgagccacaaagcccagccctttcttactcttcattacattgttgagtatagtattaactatcctatcaactgacatttatattgccatttaatccagtttgataatttttatttttaaaatgtggcatttcttgtccaacaggaaaatatcacaatcctaaatatatatgcacctaacactggcgctcccaaatttataaaacaattactactagacctaagaaatgatatatacagcaacacaatactagtgggggactttaatacgccactgacagcactagacagatcattaagacagaaagccaacaaaaaaacaatgaatttaaactatgccctggaacaaatagacttaacagatatatacagaacattttacccaacaactgcagaatatacgttcaattcttcagcacatggaactttctccaggatagaccacatgatagagcacaaaacaagtctcaataaatttaagaaaactgaaattatgttaagcactgtctcagaccacagtgaaataaaactggaaatcagctccaaaaggaacctttaaaaccacgcaaatacatggaaattaaataacctgctcctgaatgatcattgggtcaacaatgaaatcaagatgaaaattaaaaaattattcaagctgaataacaatagtgacatgacctacaaaaacctctgggatacagcaaaggcggtgctaagaggaaagttcttagccctatatgcctacatcaggaagtctgaaagagcacaaatagacaacctaaggtcacacctcaaggaactagagaaacaagaaccaagcccaaagccagcagaagaaaggaaataacccagatcagagcagagctaaatgaaattgaaacaaaaaaatacagaagtgaaacaaaaagctggttctttgaaaagataaataaacttgatagaccattggcaagattaaccaagaagagagaaaatccaaagaagctcaagtagaaatgaaatgggagatagtacaactgacaccacagaaatacaaaagatcatttgaggctactatgaacacctttatgtgcataaactagaaaacctggaggagatcgatacattcctgggaagagaaaaccctcctaccttaaatcaggaagaattagataccctgaacagaccaataacaagcagcaagattgaaatggtaataaaaaaattacaaaaaaaaaagtccagggccagacggattcacaactgagttctaccagacattcaaagaagaattggtaccaatcctattgacactattccacaagatagagaaagaaggaatcctccctaaatcattttatgaagccagtatcatcctaataccaaagccaggaaagaacaaaagaacataacaacaacaaaaaagaaaactgaagaccaatatccctgatgaacatagatgcaaaaatccttaacaagataccagctaaccaaatccaacaacatatcaaaaagataatccaccatgatcaagtgggtttcatagcagggatgcagggatggtctaacatatgcacgtcaataaatgtaatacaccacataaacaattaaaaacaaaaatcacatgatcatctcaatagacacagaaaaagcatttgacaaaatgcagcatccttttatgattaaaactctcagcaaaatcagcctacaagggacatacctcaatgtaataaaaaccatgtatgataaacgcacagccaacataatactgaatggggaaaagttgaaagcattccctctgagaattggaacaagacaaggatgcccactttcaccacttcaacatagtactggaagtcctagccagagcaatcagacaagagaaagaataaaggcatccaagttggtaaagaggaagtcaaactgtcactgtttgctgatgatatgattgtatacctggaaaacccagaagactcctccaagaagctcctagaactgataaaataattcagcaaatttcctggatacaaaattaatgtacacaaatcagtagctctcctgtacaccaacagtgaccaagctgagaatcaaatcaagaactcaaccactttttacaatagctgcaacaaacaaacaaacaaatcacacaatcaaaaaaacttaggaatatacctaaccaaggaggtgaaagacctctacaaggaaaactacaaaacactgctgaaaacaatcatagatgacacaaacaaatggaaacacaccccatgctcgtggatgggtagaatcaatattgtgaaaatgaccatactgccaaaagcaatctacaaattcaatgcaattcccatataaataccagcatcattcttcacagaactagaaaaaaaaatcctaaaattcatatggaaccaaagaagagcccaaatagccaaagcaaggctaagggaaaagaacaaatctggaggcatcacattacctgatttcaaactatactgtaaggccatagtcaccaaaacaggatagtactggtataaaaatagggacaaagaccaatggaacagaatagagaacccagaaataaacccaaatacttacagccagctgatctttgacaaagaaaacaaaaacataaagtgggtaaaggacaccctattcaacaaatggtgctaggataattggcaagccacatgtaggagaatgaaactggatcctcatctctcaccttatacaaaaatcaactcaagaaggactaaggacttaaatctaagacctgaaactataaaaattctagaaggtaacattggaaaaacccttgtagacattggcttaggcaaggatttcatgaccaagaaccaaaagcaaatgcaataaaaacaaagataaatagctgggacttaatttaagagcttttgcatggcaaagggaatagtcagcagagtaaacagacaacccacagagtgggagaaaatcttcacaatctatacatctgacaaaggactaatatccagaatctacaacaaactcaagcaaattagcaagaaagaaagaaacaatctcatcaaaaattgagctaaggacatgaacagacaattctcaaaagaagatatacaaatggccaacaaacatatgaagaaatgctcagcatcactaaggatcagggaaatgcaaatcaaaaccacagtgtgataccaccttactcctgcttctctgaatcagggtttttctaaagaaatctttcagaatcagcaaaagtggggatgacccaggcatcttgatttgcaaagtcacaaaactaagttgtcaattatcactgtagatgagcaactcatctttttaaagtatagttactgaactgattctgagaaatctttagagagaaaaaactcaacagtacaaattaactaattgggaaagttagaatgtcctttctgaatttttcattaaaaaattacattatctgaaataacatacagctactaaactgctttgtattctattaagaaatagctcctaaagatgtagtcttgtttcatagttgtaagcccaattcttctctgtatagaaaggaaacattgtgtacttaatgaattatttatacagagcatttgttgccaactgttgttccagctatctacacaggagtctgttctgaggtggcaatagcacatgggaagatgaactttccctgtttgtttacccgtttttctttggctgtatctgatgacagtataagatgttcttaataaagttttatgttctttttgaaaaaaaaatcagaaaataatagaggttggcatagatgcggtgaacagggaacacttctacactgctggtgggaatgtaaactagtacaaccactatagaaaacagtttggagattccttaaagaactagaagtagaactaccattcaatcgagcaatgccactagtgggtatctacccagagcaaaataagtcattatacaaaaaagatacttgcacatgcatgtttatagcagcacaagttacaactgcaaaaatgtggaaccaacccaaatacccatcagtcaacgaatagacaaggaaactatggcatatatatatggtggaatactactcagccataaaaaggaatgaattaatggcatttgcagcagtctggatgggattggacactattctaagtgaagtaactcaggaatggaaaaccaaacatcatatgttctcactcataagtgggaactaaactatgaggatgcaaagccataagaatgatattggggactcagtgggaaagggtgggaagggagtgagggataaaagactacaaattgggttcactgtatactgcttgggtgatgggtgcatcaaagtctcacaaatcaccgctaaagaacttactagtgtaaccaaataccacctgtccccctaaaacctatggaaataataaataaataaataaaaacttaagtaaaaacaaataaaatgtggccatttagtccatttataattaatggaattattgattgatatatatgggtctaagattattttattgctcgttttctgttttttcacctgttttgtgttatatgttttcttatgtttttggcctcctatttgtttattgagaccgcatctggctctgttacccaggctggtgtgcagtggtgtggtctctcttgcaacctccacctcccaggctcaagtcatcctgccacctcagcctcccgagtagctggggctacaggtgcacaccaacatgctcagctaatttttgtattttttgtagagatggggttttgctatgttgcttgggctggccttgaactcttgggctcaaggaatccactcgcctctgcctcccaaagtgccaggattataggcatgagccactgcatctggcctcttggcctccttttggaatgatttttataaattattctatgatcagcctttgttagttttgtattatgcattttaaattgttattgttgttacttagaaaatacaaatatatccctgatgtgagtactttattttaaaatttatatatttaaactgacaaataaaaattgtatacaattatcatgtataacatgatgtcttgaaatacgtatacatcacagaatgctaaatcatgctaattaacatatatcagctcatatacttatcctttttttatgatgagaacacttaaaatctactcagtgatttttcaagaatacaataatgttgttttaactatagtctccatgttataaaatagatattctgacttccttatttattctatgaaactaaattttgtatcctttgacaaacaactccccaattcccccattttctgtcccccatttccctgctcccagtacctggtaaccaccattctactctctgcttcttcgttcaactttttaagattccacatataagtgagatcatgtggtatttatctttctgtgccttacatttcacttaacataatgtcctccaggttcatccatgttgtcacaaatgacagaatttccttgttttttaaaagctgaatagtattccactacatacatacatacatacatatatatatatatatatatatatatatatatatatatatatatatatatatatcacattttctttatccatttgatgcaggacagacatgccccaaaattagagcttagcccaggaaagttcttgactttgcccaggaatgaattcaagggcaagccagtggttttagacagcaatcttttattgaactttattgctccttgcagagcagggctaactcatagataatgtgccaagttggcaatgaatggactgttggcaactctatacccacttatacccactttcaatcatatgccaatcagtggtgggttaatgcaaattgaggagtagtttatttaaagctttctaggaaaggggtggtaacttctcggtcattgtcatgggaaggggcaataacttctgggtccttaccatggcatttgaaaaccgtcatggtgctggtgtcttatactaatgagtagtgggggcaactagggattgcttttgttaccatctgctagtttctgctgtttttttcacttatcctgtcagtactaggaaataagtcctgccagtctcctacctcattcccccctcagatattagatactcctccttaatcttaagggggctgaagaagggtggaggtccatcttctgtaactgcttcctgctgattttatgggcataggccctgatatggtttggatttgtgtccctgcccaaatcttatgtcaaattttaatccccaatgtcggaggaggggcctggtgggaggtgattggatcaagggggtggagttcccctttgccattcttatgatactgagttctcacgagatctggttgtttaaaagtgtgcagcacctcccccttctctctcttcctcctgctccagccatgtaagatattgcctgattccccttcacattccatcatgattgtaagtttcctgaggcctccccagaacatgtacagcctgcagaactgtgagccaattaaacctcttttctttataaattacccagtttcaggcatttctttatagcaatgtgagaacggactaacacagaaaattggtactgggaagtggggcattgctataaagatacctgaaaatataaatcttaaactatgaactttgggtgataataacacatacacatagatgagactatgaacaaatattaggagaagcaaatcgtaattttagaaacagtaaatattagtaattggctaaaactcaataggctaatcaggacattagacactgaaaagaaaatcagtgaattggaaggtagacttgaggaagttgtctatactgcattgcagacagacttaaaaatacataaaaacaaggttaacagaaatagagactagaatgagaagatccaaaatacatttgaattccagaaagagaatatagaaagcatggaggaaaagcaaagttcaaagaaagaatgcttaagaatttttcaaaattgatgaaagacattactgtaaagttttaagatgcaccctcctaaagcaggaataatgaaaatggactggacacatagtagtgaaactgtgtaacaccaagacaaagacaaaattctaaatattaccagacagaaaaagacaaaataacctgcaaactaactaggtattaagcagacttcttaagagcaaaaacaaaggccaaaaggcaatggataacatcttcaattagctgagaaaatacattgagttccttattcagcaaaactgttattttacaatgaaggcgaagttaatttttctggcaaaagtccaagaatttattattcacagatcctcatttaaaaatgaaaccacaggcggggtgcgatggctcacactggtaatctcaacactttgggaggccaaggcaggcagatcacttgaggtcaggagttcgagaccagcctggccaacatggtgaaaccctgtttctattaaaaatagaaaaattagctgggtatggtggcacatatctgtagtcccagatactcgggaggctgaggtgggagaatcgcttgaactcgggaggtggaggttgcagtgagctgagattgcactactgcgccctatcttgggtgacagaatgagagagcctgtctcacacaaaaaaactaaaaaaccaaaaaacaaaaaaatcaaaccacaaagcaaggattaagatacaaagagaaatagtgagcaatattggtaaatatatgaatatatctgaaaaacacagactataaaaataattttatcatgactaattttggggtgcataaatgtagcagaatgaaaatatcagacaacaatagcaaagacagtggaatagtactgtaaaattatgcaatatggaaagcacttggtaaggtgtcataaacaaaactgagtaaatcagtaatcatcataaatacaaatggtttaaacttgccccttaaaagatctatactctaagacagggaaaaaggatccagttattttctattcacaagacttattggaatctgaaaagtaaaataatagagaaagacaaagcagaggaaaatattaaccaaaaagctattatttaaaatagaatttaaatcagaaattactatttgaaataaagaatactggaagttcctgggaaagatggctgaataggaacagctctggtctgcagctcccagtgagaccaatgcagaaggcgggtgatttctgcatttccaactgaggtacccagttcatctcattgggactggttagaaagtaggtgcagctcatggagggtgagcagaagtggggtgggttgttggttcacctgggaagtgcaaggagctggggacctccctcctctagccaaggggagccgtgagggactgtgctatccggaccagggactgtgctatctggaccagatactatgcttttcccatggtttttgcaacccacagaccaggagattcccttgtgtgcctacaccactagggtgctgggtttcaagcacaaaactgggtggctgtttgggcagacaccgagctagctgcaattttttttttcataggccagtggcacctggaaccccagcaagacagaaccattcactcccctggaaagggggctgaagccagggagccaagtggtctcgctcagtgggtcccactcccccagcgcccagcaagctaataaccactggcttgaaattctcactgccagcatagcagtctgaagtcgacctgggacaatccaggttggtgtggggaggggcgcccgccattactgaggcttgtgtgggtggttttcccctcacagtgttaaggaagccactgggaagttcggactttgcagaattcactgcagtgcagcaaagcagctgtggccagactgcctctctagattcctcctcaatgggcagggcatctttgaaagaaaggcagccccagtcaggggcttatatgtaaaactcccatcttcctgggacagagcacctgggggaaggggcggctgtgggagcagcttcagcagacttaaacattcctgcctgccagctctgaagagaacagcagatctcccagcacagtgcttgagctctgctaagggacagactgcctcctcaagtgggtccctgacccccatgcctcctaactggaagacacctcccatcagtggttgacagacacctcatacaggagagctctggctggcatcagactggtgccctctgagatgaagcttccagaggaaggaacaggcagcaatctttgctgttctgcaggctccactggtgatacccgggcaaatagggtgtatagtggacctccagtaaactccagcaggcctgcagaagagggtcctgactgttagaaggaaaaccaaaaaacagaaagcaataacatcagctgggcatggtggtttattcccagaactttgggaagctgaggcgggcaaatcacaaggtcaggagtttgagaccagcctagccaatatggtgaaaccctgtttctactaaaaatacaaaaagtagctgggcatggtggcgcgcacttgtagtcccagctacttgggaggctgaggtgggagaatcactcgaacctggaaggtggaggttgcagtgagccgagatcacgccgctgcactccaggttgggcaacagagcgagactttgtctcaaaaaaaaaaaaaaaaaaaaaaaggcaataacatcaacatcaacaaaaaaaaggatgcccacacaaaaaccacatccaaggtcatcaacatcaaagatgaaaagtagataaatccacaaagatgaggaaaaaccagtgcaaaaatgccgaaaattccaaaaaccagaatgcctcttctccttcaaatgattgcaatgcctctccagcaagagcacaaaactggacagagaatgagtttgacgaactgacagaagtaggcttcagaaagtgggtaataacaaactcctctgagctaaaggagcatgttcaaacccaatgcaaggaaactaagaaccttgataaaaggttacaggaactgctaactagaataactagtttagagaagaacataaatgacctaatggaggtgaaaaaacacagcacaagaacttcgtgaagtgtacacaagtatcaatagccaaattgatcaagtggaagaaaggatatcagaaattgaagatcaatttaatgaaataaagtgtgaagacaagattagagaaaaaaaatgaaaaggaatgaacaaagcctccaagaaatatgggactatgtggaaagaccaaacctacgattgatcggtgtacctgaaagtgacaggaagaatggaaccaagttggaaaacaagcttcaggatgttatccaggaaaacttccccagcttagcaagacaggccagcattcaaattcaggaaatatagagaacaccacaaagatattcctcgagaagagcaaccccaagacacaaaatcttcagattctccaaggttgaaatgaaggagaaaatgttaagggcagccagagagaaaggtcaggttacctataaagggaagcccactagactaacattggctctctctgcagaaaccctataagccagaaaagagtgggggccaatactcagtattcttaaagaaaataattttcaactcagaatttcatatccagccacactaagcttcataagggaaggagaaataaaatcctttacagacaagcaagtgctgagggattttgtcaccaccaggcctaccttaaaagagctcctgaaggaagcactaaatatggaaaggaaaaaccagtaccagccactgcaaaaacacaccaaaatataaagaccaacgacactatgaagaaactgcaccaactaatatgcaaaataaccaactagcaccaggaggacaggatcaaattcacacataacaatattaaccttaaatgtaaatgggctaaatgccccagttaaaagacacagactggcaaattggataaatagtcaagacccatcagtgtgctgtattcaggagacccatctcatgtgcaaagatacacataggttcaaaataaagggatggaggaatatttaacaagcaaatggaaagaaaaaaaaaagcaggggttgcaatcttagtctctgataaaacagactttaaacaaacaaagatcaaaaagacaaagaagggcatcacataatggtaaagggatcaatataacaagaacagctaactatcctaaatatatatgcacccaatacgggagcacccagattcataaagcaagttcctagagacctataaagagacttagactcccacacaataataataattcctggacacatacactctcccaagactaaacctggaagaagttgaatccctgaatagaccagtaacaagttctgaaattgaggcaataattaatagcctactaccccccaaaaaagcccaggagcagacggattcacaggcgaattctaccagaggtacaaagaggagctggtaccattccttctgaaactattccaaacaataaaaaaagagggactcctccctaactcattttatgaggccagcgtcatcctgataccaaaacctaacagagacacaacaaaaaaagaaagtttcaggccaatatctctgaagaagattgatgcaaaaatccttagtaaaatacatgcaaactgaatccagcagcacatcaaaaagcttatccaccatgatcaagtcgacttcatccctgggatgcaaggctggttcaacatacgcaaatcaataaacataatccatcacatgaacagaaccaatgacaaaacccacatgattatctcaatagatacagaaaaggccttcgattaaatttgataccccttcatgctaaaaacactcaataaactaggtattgatgaaacatatctcaaactaataagagctattcgtgacaaacccatagctaatatactgaatgagcaaaagctggaagcattccatttgaaaactagcacgagacaaagatgccctctctcaccactcctgttcaacatagtgttggaaaatctggccggggcaatcaagcaagagaaagcaataaagagtattcaaataggaagagaggaagtcaaattgtctctgtctgcagatgacatgattgtatatttagaaaactccatcgtctcagccccaaaacttcttaagctgataagcaacttcagcaaagtctcaggatacaaaattaatgtgcaaaaatcacaagcattctatataccaataatagacaaagagagccaaatcatgagtgagctcacaattgctacaaagagaataaaacacctagaaatacaacttacaagggatgtgaaggaccttttcaaggagaactacacaccactgctcaaggaaataagagaggacacaaacaagtggaaaaacattccatgctcgtggataggaagaatcaatattgtgaaaatggccatatggcccaaagtaatttatagattcaatgctattcccatcaggctaccattgactttcttcacagaattagaaaaaacgacttcaaatttcatatggaaccaaaaaaagggcccatatagccaagacaatcctgagcaaaaagaacaaagctggaggcatcatgctacctgacttcaaactatactataaggctacagtaactaaaagaacatgggactggtaccaaaactgatatatagaccaatagaacagaagagaggcttcagaaataacaccacatgtctacaaccatctgatctttgacaaacctgacacacacaagcaatggggaaaggattccctaattaataaatggtgttgggaaaactggctagccatatgcagaaaactgaaactggaccccttccttacaccttatacaaaattacctgaataaagacttaaacagaaaacctaaaaccgtaaaaactctagaaaaaaacctaggcaataccattcaggacataggcatgggcaaaaaagatttcatgactaaaacaccaaaagcaatggcaacaaaagccaaaattgacaaatgggatctaattaaaccaaagagcttctgcgcagcaaaagaaacttgtcatcagagtgaacaggcagcctacagaatgggagaaaatttttgcaatctatccatctgaggaaggtctaatatccagaacctacagggaacttaacaaatttacaagaaaacaaaacaacctcatcaaaaagtgggcaaaggatatgaacagacacttctcaaaagaagacatttatgtggccaagaaacatatgaaaaaagctcattatcactggtccttagagaaatgcaaatcaaatccacaatgagattccatcttatgccagttagaatggcaatcattaaaaagtcaggaaacaacagatgctggagaagctgtggagaaataggaacacttttacactgttgatgggagtgtaaattagttcaaccattgtggaagacagtgtggtgattcctcaaggatctagaaccagaaataccatttgacccagcaatcccattactgggtatatccccaaaggattataaatcattctactataaagacacatgcacacgtatgtttactgcagcactatttacaatagcaaagacttggaaccaacccaaatgcccatcaatgatagactggataaagaaaatgtggcacatatatactatgcagtcataaaaaagaatgagttcatgttctttgcaggaacatggatgaagctataaaccatcattctcagcaaactaacacaggaacagaaaactaaacactgcatgttcttgctcataagtgggagttgaacaatgacaacacatggacacggggacggggatatctcacaccagggcctgtcagggtgtgaggggcaagaggagggagagcattaggacaaatacctaatgcaggtggggcttaaaacctagatgacaaattgatgggtgcagcaaaccaccatggcacgtgaatacttatgtaacaaacctgcacgttctgtacatgtatcccagaacttaaagtataataatacaaaaagaaagaaagaatatcattaaaattaataaaagaaattattctcctggaaaaagctggattctatacacacagaacaaatactaaaaatgcataaatgtaaattgtatgaagcaaaattgtatctctttacacagtatactaagaaatccaagaaatggccagaaaattattagtaatgatatgagagtctgatgtcacattaatcaagataaatacaaagattacttttctctacacttgttaaaattaattaaaaaaatgtaaaaatcacacttacaatgacaacaaaacattataggtacctaggagtaaatataacaagaactaatatgaagaagtctgtaaacttttcagaaagcaccaattgtaaagtcttgtgaaagcaccaatatgaagacctaaaccaatgaagactcatacaacatttctgggtgaagtgacttcagtaataacaataatgtcaaatatctccaaatagttaactcattttcagccagaatgctattttttttagaggggagtcaggtaaaattaaagttcatgtggtggaacatattccaaaagagccaagaaaacaaagaacaaagagcagaatgagacatgcttaatagatactcaaactttctatataccctgtataatcaaagcagtatgatatgacgtttttatcctaattgcctcactttacaaaattgtaatattaccaatatactgtatatctgcttgtgtattttattgtctatatatctgcttatgtactttatacataagctgataagcaacttcagcaaagtcttaggatactgaacatctgtgatttatacctgaaaagaataaatcgcaataaatcattggatttcttgatccacccagaactcgtttttgacccttggagggcaatgtggcccctgttgagaatgcatgatttaggggaaaaagaataattgactctacaaatgctactgatataatttgatatctgtcaagaaggaaaaaaagtgaaacctctgttcacaccataaacaaaatggattaaatatttaattgaagagaaatagaaaataaaaattataaaagagaaaaaaattaagtgactataaatatgtgtaccatagtagtcaaggagaccatttatttatttatttatttatttattttattttattttttcaactttattttagattcagcaagtacatgtggaggtttgttacctgtgagtattgtataatgctgaggtttggaatatgaatgatcctgtcactcaggtagtgagcatagtagccaataggtagattttcaaccctcatcctcctctcttcttcccctctcttcttgtctccagtatctattgttcccatctttatgttcatgtgtacccaatgtttagctcccacttgtgagaacaagctgtatttggttttgtttctgtgttaattagcataggataatggcctccagctgcatctgtgtggctgcaaaggacatttcattcttgttaatggctgggtagtattccatggtatatatgtaccacatttctttatccagtccactactgatgggcacctaagttgattccgtgtctttgctattgtgaatagcactgcgatgaacatatgaacgcacgtgtctttttggtagaataatttttctttgagtgttttatatatatatatatatatatatatatgtaatgggattgctgggccaaatggtagttcttttagttatttgagaaatatccaaactgctttccacagtggctgaactaacttacattctcattaatcatgtatatgcattccaaagagaccctttagaaagcccagaagtttccgaggataaggcagacatatttgactagatgaaatatatttttgtatagtaaaatgtaccttcatttaatctacttcatgtcagttaacaaatctttgatgagcatctactatgtgcgaggcacttttctaagcatggagattcagcagtgaacaaagtcccttagagtttacattcttgtggggcagaaagtcaataaacaaaaataaatatatgatgtcaggtgataaatgctagtaataaagatacatcagggcaaagagatagagaatggggggtactgttttacttagggtagtcaaatttaagcatatttcttaaaataattgagtagtgcatatgtttgagggggagtgttcaggctgattctgaagcaagaacatgcttggcaggcatgaggagaaatgaggaggccagtgtggctgcatcaatggaagggagatggagagtgggtgatgaggctagaggagaagccagaagctagatactgtaaggccttcaaggccaggataagaactttcatgaagctgggcctggtggctcagcctaatcccagcactttgggaggctgaggcaggagggttgcttgagcccaggagtttgagaccagcctgggcaacataagacctcatctctagcaaacctaaaaaataaaaaattagttgggcatggtggcgtgcatttgtagtcccaactactcaggaggccaaatggaaggattgcttgagcctgggaggttgaggttgcagtgagctgtgatcatgccagtgcactccagcctgggcaacagctcgagaccctatctcaaactaacaaacaaagaaacaaaaaaacaactttgcaatttttacgctgatgggggttggtctttggagagttttgagtagagaagtgacttcatctgatttatattttgaaagcacgattccgttgggagtggggagtgggattgggaagctcagtttggaagcaggcacagcaatgcaggtgaggtatggcgatggtttggacttcttgatgaaggagatgagtagtagtcagattcaagatataattttagggtacaggttgatgaattggatgtagagaaagaatgagtagattgggaaaacattttcaacacaaatggcagataaaaacttaatatgcaaaaacacataaaactgagtaagacaaagggcaaaccaccagtttgaaaagcaattaaatcacaggagagaaaattcaaaatacgattaaacttatgaaaaaatgttcagtctcactagtagtcaggaaaatacaattaaagaaacagttagataccacttttctcaatagacaaagattaaaaatagctaccgcttccagcaccagtgcaagtatggggaagataggactctcatatcttcctgtaggaatatgaattattacaaatttggggaaaaggaattaggtaatatctattaacattaaaatacacatttcttttgatctggcagttctacttctggaaatctatcctagagaaataaaatcctgatcatatatagagatgtgtattgcagtatcatttggcaatggcagaatcatttagccaaaggcaaaaggttggaaacaagctaaatgtctatctttaaggaaatggttgaataagcagtaattcattcacactactggatgctgtgctattaaaatgttagattgatgtgttgcccatgatgtattgttaggcgaagaagacaagttgcagaattatgtatatagtttgaccctatttttagaaaaaaattcctacatatactcatatttgcatatatttttatataaacatggattaagatgtggagagattcatagaaacttaacactgtgagtttttaatttttgaagagagaaacttaataaagatttgaatagaaaatttattgagacctagcttacaacgtgtataatctgtagtgtggcatctcaggtttgacttcccggtcttggcaagtgctcaagcttctggatgatgatagataagagtgtctttattcctgaaacactaagattacaggcttgtatttcttcaaaaccacaattggaacttctcaagtagagtgtaggaacactagttgtttttttcctattcctgattgtttttaagggggagagtaaaggaatctcatcaaatataaaactgaatattttgatcaatttttcagcttattcttttattcctttggatcctgttttttccttctatatcttgtcccctttctcggttccctgtattcacttccttgatatgtcagttataacctagggtgagagatatttaggggaaaatgggaaattgcatttttttatttttattttttgagacagagtctcactctgtcgcccaggctggagtgcagtggcacgatctcggctcactgtaacctctgcctcccgggttcaagcaattctcctgcctcagcctcctgagtagctgggactacaggtgtgcaccaccacgcctggctaatttttgtatttttagtagagacgggtttccccatgttggccaggctggtcttgaacttctgatctcatgatctaccctcctcggcctcccaaagtgctggaattacagacatgagccccacacccagccaggaaattgcatttttaatgcactactaactcagggagtctttaattgggataggagccgcattaactgattttacataaattgtttgtttcctaatattttgtgtttctcattcagcttcattatctctaaactcacctttctgcttttctttcctatgttctgctcctaaatgaaaaatgactaattgaattgacttctattccattcttgtgaacaggacatttgacatttgtattagtttatttgcaaaacaaaatttactattgatttcttaaggtaagtttcacattcctacttttatattgccactatcttagaagtatatatttatgtattttcttaaaattttcatcattttgttaaacatggtgtcattttgatagcttgtcctttctcccttcctttgtttggggtcctttaagatttccacatgtgtatctttacaggagggttaacaattgctttaaatttgtcagtttttcagtggcctttagaaaatggtccacagaatttttatagttggagtattctattgtatgatttacttgccttcaaagacctagtgggagtgcaaatgttttgaccccaagttagaagttatggagaagatacagggaggtttctatagatctatctcttctgaattcttgcttcagtgggacatacacacagatatggagtcagctgagctgggttgctgaagcctatctactgttttttagtaattgccttgacaaggtccctgcttcttaccagaaatctgagagaagttgaattagtcatacccttctaaaacctagtagtggctgggcacagtggctcacgcctgtaatcccagcactttgggaggctgaggcggtggatcacctgaggtcaggagtttgagaccagcctggacaacatggtgaaaccccatctctactaaaaatacactaattagctgggcttggtggtgcactcctgtaatcccagctacttaggaggctgaggcatgagaatcgcttgaacccaggaggaggaggttgcagtgagccaagatcatgccactgcactccagcctgggtgaagagtgaggaaaaacaaacaagcaaacaaacaacctactagttagctgtcacatggaccagaggggctataggaaaaatgacatgagaatgatgaaaatctaatacttttaactatgtgaaaatctttctggtcaaaaatgttccctgataacagcataatgtatgtaaaagacatgccaacaaaggctggtaaaatctctaaatgtgtattttccacagatgacaaaagcaacttacaatattaaaatccatgtttaatatctgtcttcttctctctcactctctctctctctggcaactcagttttgctaaacctgtgcagctcatcaaagacctgaggattctgtgacttctaaaattaacataggcttccatacctgcggcagggctgtgagaacacagtagacagccatacagtggattagattgtgctagaagttatggagatactcttttaaggttgtgattgggtagcctgaaacatttatgaaacattttatactttgggcagagactaatgtctggtttctctccttttttcatcaaacgcctccaaagaatagcatatcagtatgaaaagcttccttggaagacatctagttagtccaaagaatttgataactagaattatagactctcaggaagtctatttggaagggaccataaagataacttattccaattactcagctgtttcctgagtctcctctatggcattctcactgaatgagccttaaactcttgcttaaactctttggacctccacttctccttattactaagataaaatttgttactttgtaccttccattcactgatctcatttctttggggctatacaaaatattctaatcccttatgaactttcactatttgaaagtaattctcattgtttcctcatatttgtcttcccaggggaattctgcaacttcctgcacacttgagtctttctctcctgaaggcatttagtttatccacatcccatgattgaactaaatgtatattcagggtgtgggctaaccagcacagtattgaacagtataaaaataaaatttctaaaaatgattattttaaaatagactaaaataagttaactctgttggatgtttgaaaggcacatcccacaactacttacttgtatctctatattcttcctgcttaccttccttctcctagcttcctttctttggaaagtgctctttagaagttcattagtcagctccaaatagcaactacagtgttctttcagtccttattttccttgaagtctcagtcatttttttctcaaaactctcatcttccttaattattggaacattccactatacaggttttccttctatcttcctatcccttagttaaatttcttcaatatattacatataacaaactcagtccttggacttctgctttcgttagtcctgtacttcctcctttgaagaactcactcttattgcttcaattgttacctgtactcatctaattccagatatctcttgaatgacaaatgttattgcttatccccttaaaacaatttgttgttccctccctgtcccccaaattagttcctagtttgtttgttacctagtttcaaaagttttgaaaccattgtttttttcacttttccttactcctatgcagtcagtcatcatgaagtaatgattcttctttgattttttttcctatttattctctttccattacttactccaagtacttcttaattagatttactatctatgatgtttctttttctatcttatttttcacaatcacatgatacaaccttatttttaaaatgatacaaccttattcatttcactctgtgtctcaaacattgtagaatgcttccagctgcctgaagagtaaaatataaattcctggcttgtttttcaaatccttttatattctccttttcaaaattataccccaggatgcctcccatgaatcttccgtaacagcaaaattgcctactgcacctggagcatggcacgacagcctttaaccctttacctttcttttactctttgtaattcactcagcatatcaacaccttatccatctgctgtgacatattgtataccactactcccttccccatgaagttaccacctctactttctcatcccatgatggattatgttgtccatctaaactttttgtaacttagattttacttaaaaaattgccatgtatacatatatcactatatatgttataagctacttgattgcaggagctttgacttgtgtttttctgtacaccccttattgctagaccagtgccttgcaaacattaggcttgccatgaggagttactggttgattggttggaaaggctatcatagacatacttgtcaaaggaaattactatatatttctttaattaaaatgttttacttcagaaagtatccagtctttcttgacggaatcatatacgtcttaacttatgaaacaaatatttggaaactgaggtttgtggctgagagattaaaaagggtgaaacttctgaagagcagaaactgtgatatgaagatgaaagggattttataattgtaatctgtttaggcaatggctgggatatggtttgtatctggagtatgggaatcataataatcacttgtcttatgggcctttaaaaaatttatccttactcttccacttttttgttgtacttccttcctgtatttgccttcgcccttttcgagccttttgatttttcaccattgatttctgattctctctttcctttaactttgtcctttcctttgtcaccttttgtgtttttgtcacctttttcttttttatttggatctttctctgcatctctctccttttctttatcattatttcctttatcctcaaaactctccttcttttcttgggcttcctgtccttttagtacacctgactcactcttctttacttgggattccagtgtttctggtacactcacctcagtgttctttacttgggattctggtcctttcagtacacctgcctcactcttcttttcttggacctcttgttcctttggcacatctgcctcagtcttctctacttggccttcttgtccttttggtaccttcaactcactcttctctacctgggcttcctgtcctttcagtacaactgactccctcttctttacctgggcttcctgtccctttgagacaccagactgactcttctttacttgggattcctgtcttcttggcacacccatctcactcttctctacctgggcttcctgtcctttcagtacaaccaacccactcttcgttacttgggcttcttgtccttttgggacacctgactcactcttctttacttgggactcctgtcctcttggtacatctgacacacttttctttatttgggctccctgtccttgtggtatactcatctcactgatttttagttgggtttcctgtctttttggtattccagcgtcactgtctaccttgacctccattcctattttgtctttctctaaatcagtgccttttccttctctttctggctcctttatgtgtgctgatttcaaggattctacagaattcgtaaatatgatgtcattctttagtgcttccttgttttcttctcggctattctgagaccttgcagtgcctccacattttagaatctggattttggaacaaggtttttttgcaagttcttcatccatgtaacctgttaatataactgagcatacaacaaaagggcgtgatttagatatcaagtattttctctttatttctatttttttccccttgatactggttccttttttgtcttaaaactgacaaactaaaatttttctgaatctcaagttatctaaaatgatggttctctgtacataaaattataaaagtatcgataaaattctggactattttcaataatttggaagattaatgagagaaaaggtaaaatgtactgtaaatgaactgacatttgttcagtggattatggctaatgaataatgcttagtggctaacagaggatgtattctgaaaagaaatagaatttgttttaaggaaaaattgtgggaggaagcaataattatatttctcaagacagaaaaaggaaactcaaaaatgctttccatattgaataaaagcatatcttattatgcaaaagtaataacagtactagctgataattattaagtgcttaccacataccaagtactcactgctctaagcactttatgtattaaatcatttgatactcacaacaaccaggtagggtattattaacctcattttacagatgaagaaactgaggcacagaatgcttaaatgaatatgaataaggttatgtaatcagtaggtggtggagctgggatttgaatctgagtagtcagactccagtgttcagttttgatcattactgtagactacttcttgcaatatctgcaaactctgcaaaaatttcaggtcctttgatcatgttcaggtaaatcagctgttacgtctcaattcctgtgtgatttaacaaacctgaatttattggcttctgctaggtattttttatttgcttttgttttttttaagtaatatggttccctgaattaagtaaaagaaatatctgagccaccaaggaattgtgtgggttcttgccgtggagcagagggatgtcttgctttgagaaaatctaatatttaatatttactatagtagaaagaatactgaatataaaagctgaatcagaagacttgggctgggggcagtggctcacacttgtaatcccagcaccttgggaggccaaagtgggcggatcacttgaggttgggagttggagaccagcctggccaacatggtgaaacctgatctctactaaaaatacaaaaattagccaggcatggtggcacacacctgtaaccccagctactcatgaggctgaggcaggagaatcgcttgaacccgggaggcaggggttgcagtgggctgggattgcaccactgcactccagtctaggtgacagagcgatactccatctcacacacacacacacaaaaaaaaaaaaaaaaaaaaaaagaagacctaggtttattattcctgctagctgggtttaatgggtttattaaggtaaatcagttaatcctcaaagattcactgtttttatatttagtttgatctgctcactttgtagagttactaaatattgtagacaaatgttaaagtaacatagcctttggagacagactggttcaaatcctgcctccgcacctgcctagctgggtgacctttggcaaactttactttctgtctgtaaaatgggggcaatagtagtagctacctcaaagaggtgttatgagattaaataatgttatctaaataaaagcacttggtacagtgcatgggacataagtagtcaataaatattggccattactacttcccaatgagatagtacaggaaaaaactctctaattcaatcaagacaaggcattcttagtttccaacaaataatttacaggagtggttaattgtattacaggaaaatttctttttttttttttttttttgagatggagtttcgctcttgttgcccaggctggagtgcaatggcacgatctcggctcaccgcaacctttgcctcccgagttcaagggattctcctgcctcagcctcccaagtagctgggattacaggcatgtgccaccacacccggctaattttgtatttttagtagagatggggtttctccatgttggtcaggctggtcttgaactcctgacctcaggtgatccacctgcctcggcctcccaaagtgctgggattacaggcgtgagccaccacacccagccaattacaggaaaatttcttgcttaaaagtgaattattggacttttcgttttttacatttagggtttgatgtttgaaaaattggcatacacataacttcagaattttatcaattataaaaatgaggcacacctgtattagataagaaactaattataaatcaaaagagttgttgtagttcagtgttttcttttattattttcagctgttgacatccaaataaaaataacattaggaaaattacagtaatgttttctgaacctttttgtatatgtccccacctagagttcttcattaaaatatggttactgacattttattctagacaatcaattttcagtttcctaatgaaaatcagtggtaatatatttcaagcattgctaaattgagaaaaatagttcagaatattttgatcttcgacagtgctaccagtggacactgttttgttttgttttgtttaggggtatggtggtgtggaatggtaagatcatgctccgctgaagtttctaaccttaagaatttcatggaatgtactcctcacataagctgattttccttaagctatgaatatttttagttttactatcccttgggggtaattatttgctactgtgtgtaatacttcatgactcattttaacctaaatttaccttctaaattatataggctttgtaaaccaaaattaagtattataggatttcctgaagcacccagtgtttattctagctacacctttcctaatttcacagaattaaaaaactttttattctttctcccactacactgaaaaatacctctagttacttctaatagaatcttcatacccttattttaatatatttgctgtcatcttttaaatcttgaatttaattaacatagattagatttacaggatttatttttgagtaatctagctatcccataaagtgaggttcacttttatttcaactttgcattgcagaagtaagccacaaatcattattccaccacattctaagttcttttcttccttctcccagatttcaagatagttcatacatcttttccttctcttggacctcataatcatctaacacatacagtgtaaatcttcataatataaagacttggaagccctggctgcaagtacatttattgcaggcagtagcccatactacaaaattttaatacaatcaaaagatttaatcaagactttggggatcatcataatatattcaagctgaataaaaagtaattattaaaatttttaaattggattaatttttgttaaagctaaaagatatcatgaaatagctatcacattaacaattctatctaaatgatacttaacatagaaaatagaatgtgggctttattaggaaactaatcttaggttcttaatccagtggttgtcagggagagcacaattggatctagactgtaaaagatctattcagtatcagagggataaatcattatagttctcaggctatgaattacattttaaaagatcatatacttattagttgaatgaggaggtgagaaataagagactcagtttgctgggatgatgatgtttgttggtttaatctatcttaaacctttctttgaacattgacttaaaccttaacctcctttttctaaaaatatcaactggggccgatgcagtggctcacacctgtaatcctagcactttgggaggctgagatgggaggatcgcttgaggccaggagttcgaggccagcctgggcaacatagtgagaccccatctctattttttaaaaaaaatagaaaaacaatcaattgggaaaactgtgtttgaaagagtatatcaataagaatatgtcttttacaaaaaattttttaaaagattaaacagatttttctctggcaacttaaaaaattagtattcattaaaaatttattacctctgggaagagacttggcctgtgatcccttctcagagcccttgtattagtcagggttcttctgagtcaagttgacatacaacatcaatcatcagagcccaccttttttttttgtaagagaaactcacaagatcacagtcctatcactttttctatgtgaggagagcatttgagggatgttggcgcattataattattctgaatgcatactgtttcttgtaccatgaatcaaaagaaattaatttccccggctgggtgcagtggctcacgcctgtaatcccagcactttgggatgctgaagtgggcagatcacctgaggtcaggagttcgagaccagcctgaccaacatagtgaaaccctgtctctattaaaaatacaaaattagctgggcatggtggcacatgcctgtaatcccagctacttgggaggctgaggcaggagaatcacttgaacccgtgaggcagaggttgcagtgaggcaagatcgtgccattgcactccagcttgggcgacaagaacgaaactttgtccaaaaaaaaaaaaattaattaattgcccctttcaacttcatctccctgccttcctttccctccaaacccactctctttctagtgtgaactgagaaagaagaatgaggcttaaacacgattaaatataaggacatattttgtgtttgtgtcagtgtttggaatgtttgaaatgcttgaaacatgtctcactaggtttaagtcttatttgcttcttttgatcatatgtttacagaattaaacaaaagttattattctactttgttttgtatggtttccttgcttgaagagctgagtcatatattaagtaatcccaatagagataaatctgaatccagaaaacagttaaaaaagtcaaacattgatttaaatgcggtcttctatttttaaaaggatccttttgtgtacatttagttatccagcttttctgtagatgtatatttgtatttgcaaacattccataaagtttcctgactaatcacaaaaaatgcatttgtgattcagtataggaggcaatgtgttagtatgggaagagtgggaagagtgtgtattttggagataggacatcctgggtttaaatcctgacaccaatgtttaccaactctttaaccttgggtaaatacctgagttagtttcctaatctgtaaaatggggaataataatacctaccaggcaggcatatggtaagaataagagatgttacttttgtaagtgcctagcacagtgcacaaatacatagtcaatgctcaatacctactgtctttcaaaggtagttatttagaaggcaatagaaaggagatggtattttgtttttaactagtttttttcccccattaatatgattcagagggacttcacctataactaaaaaaaagttctaaattcccagcaaataactaatggaattcagaaaccaatcttcctttcattatgttttcctgagaatcagggaggagattctttttcagagcctagaagatggccagagattgtggcaccctttcatatgagcttcatcttctctacagcaatctcttaaattgtagttatttaaaaacttggggcctggcacagttgctcacacctgcaatcccagcactttgggaggctgaggcaggaggatcacttgagcccaggaattcaagaccaacctgggcaacatagtgagatcctgtctcaaaaagaaaagtggagggcgggggggaaccttggaagtttctggaagataggaacattcaaattggccttagaagcacaggcctctattttgggagtagaaacagacaggtcacaaaagaattaaaagcaatgtaaaatatcagagttgagaatagatatggaacttacccacaggagtcagtgctaaaaacaaaacacaaaagaaagatcagtgaggattttctaactcaagagaaacccaccttccaatagtatccttcctaggtgaacttagaaacaggacttggagggagcacaaaactctgtttcatcctcaggagtgttgctggccaatgctccatatcgcactccacacagagggttatctttaggatgccatttaattaatataggcatttgaaatcttgggtaggtaaaatcacttctactgaaattcaaactattgtatttcctgcctttctttgttctttgataagtctttcatatgtcttctgcaaaacagttttttgctcactgttctggtccgtttgaaaaatgtatattgttgatcaattaccaaaatcacatctagtcctgacacatattctttttgtcaatcttagaggattttcttttttagtaaaaattattagttgccagattatagcacagaggaaataggctctgttgtgatagattagctgggaatatatgctaccaataatctttggtagtaaataactagaatcaaacacaagaccattatactttgttacaaaaggaaaatagataagaagaattaaaattgaaatatgaggaaatcacttattgaagaaatattgactgctgtaaggtagaggaactcgtaacacaagaacatttgggaaaaagaacttaaaggtcctaggcacagaaataggtaaggcaaggaaatgatccaaacttactgatttttccagaactgtccactgaaagagataaaggcaaacacttcagtaggtactgggcattcccttcttcccagtccccaaacctctgcattgagtgggatctgtgtcattaacaactaaatttcatttatttaaatgtgaagaaacttcatttcccttcccccttctctttgcccagtgtagtttacaaagaccttgtgataagctactttaaatcacctttacttatcattgatcattatcaattttgtctagaatgtcaagattacaatttataaaatataggacatataatggtcttgcttagaagatgtgtgctaacattattttttgacattgatacgaatttttttttaatatatttttttgagacagggtctcagtctcccaggctgcagtgcagtggcatgaacatggctcactgcagcttccacttccggggttcaagcgatcctccagtttcagcctcctgagtagctgggactacaggtgcgtgctaccacacccagctaatttttgtgtttttttgtagagacggagtttcatcacgttgcccaggctggtctggaaccctgagctccagcgatccacctgctttggcttctcaaagtgctgggattacaggtgtaagccaccatgcctggcctggtacgaaatatttaagatacagttgttaccaagtactgaaatataggtatatctcttgtgttgatgttacttgataaacctaacatagaaagcacaaaataggctggcgccgtggctcatgcctgtaatcccagcactttggaaggctgtgaggcaggcggatggcttgagcctaggagttcaagaccagcctgggcaacataatgagatccccatctctgcaaaaaaaaaaagaaaaaattagctgggtatggtggcaagcacctgtagtcccagctgctcagaaagctgaggtgggaggattgcttaggaagtcaaggctgcagtgggccatgatcacaccagtgcactctagcctgggtgagtgaaacgctgttttaaaaaaaaaaaaagcacagaataataagaaagcatgaaactgtaagaaacatataccaggattgtttaccagagatacatatgtggagttagggtatttaaaaatgggagttggcaaaatacagcccatggaataaatctagtttttccatataaatctagttttccaaataaaaatagcatctaggacatgctatttttgcatgtcctgtgaggtaagaatggattttacatatttaaatagttgaaataataataataataataataataataataataataataatattttgtggcacatgaaaattgtatgaaattcaaatttcaatgtctaaaatagtattttattgggacatacccatgctcattcttttatatattgtctatgactgtttttgtgctacaacagcagggttgagtagttgtgacagagactttaaggcttataaaatttaaaatatttggctgggcatggtggcttatacctgtaatcccagcactttaggaggctaaggcaaggggatcgtttgaggccaggactttgagaccagcctaggcaacatagcaagactcagtttctacaaaaaataaaaaaaagttagccaagcatggtggcacacatctgtagtcccagctactcaggaggctgaggcaggagaattgcttgagcccaggagtggaggttgtagtgaactatgatcacaccactgcactccaggctaggtgacagagcaagaccctgtctcagaacaaaacaaaaccaaaaacaccaaacaaaccaaaaaacacaaaaacccagcaaacaaaaacaaacataaaacattaaaaacatttgtagaaaaaatttgctcaccccagccctacaagaaactaatgtaataaaaatatattaggaacttactagtgtgaacttgaggtattcctgaaaatcaaaacaagaaaataggttaatggcagcatttttggaacagaagtacagttctttcctactcccaattccctagttgttttttctggggtaccataaagacttctagcagaatacaatgaaatatgatgagacaacagatcccttagtgtgttataagaacctgacagtttttaccacctttatgtggtccaacttattgttgtctctctaattgagctctctgctttcacccttgcctcccagtcagttcccagtacagcagttagcgggacccttttaaagtgtcagcaagactcctgcttaagagccaccaatggttccccatcttggtttaacaaaagtcaaaatcacaacagtggctttcaaagatggccctggaagatctgtccctccaaatctctcttatagcttctttttatgtcacttttcattctgttccagctatatggtacttgctatcttgcttttcctcaaatagtctggaaatgttcctaccctagggtggtttacttgttgtcttctctgattgaaatattcccccctcagatattgcctggctaattctctcacctatttcatgttccatctagtagttatagcaattgctgagaatgaggcattaaactttccaactgtagttgtgggtttttctgtttctcttcagttctagtacgtgtttttttttttcccagtgtgttttgaagcactgttgtttggttcatacatatgtagaatttctttgtcttcttgatgcattgatatttttatcatgatataatgtccctcttttgtccctggtaaatttctttgcatttaggtccactttacgtgatattaatgtagccacatctgcctttttttttgaaaaaattaatgtttcatggcatatatttttcattctttttacttttattgttaaatttgaggtgactttcttgtagataggatatagttaggtcatgtttttaatgtactctggtaatcttttgaaaaaattggtgtatttagacctacacaaaataaatttctgtgatttgcctgattgttatgagaggcaagtcccaattctttcaaggaggggaagtcagaaaaggcttaatctctgcagcactagtggtccaagtttagatgtaataaactttatggaggaaaaggcaaagatcaatctttcttttttatcttgaattctattttagtgttttctctgtttgcattttgcagtctgtcccttcttctactcccatttgctacatcttctagtttttattatttctaccttttatcttttggagtttcatcttgtgaccctgtggcttcagactgtgatacaaacttcttagtgtattatttccatagtcttcccagcatattttcccagcattatttcctctggcttctcttttgcaacttaactctctaaccagaagaacaaattgattttggtcctttctatgtggtttcttgtttctgtgggcctttgacttatttaaaagacaaagacaggaagaagaaagaaagaaaggaaggaagaagaaagaacgagcgaatgaacaaaagaaagaaagaaagaaagacccaaactaaaccaaaatagaaaccaaaaacaacaaaagtgtcagtgcaaataaaggaatcgagatgctacaaaagaccagaggaaactgagaaaaacagtaggagcttactggttgctattggaccaattgctaaaaataaaataaaacaaatcagtttttttttaaattatgtattgagttcctattgaaaatccacttggaacaccagaaaacagacctttgggaaacattaaatcttctaggaatatgctatctcttattaagtcaattttaactccactttaataacttaaatatccaggccattttgaatggcacgtatgatgggttatataagtgaaggccactttttctaatgaaataaaatatttttttaaacattcttaaactaggtcacattctttcaggagactggctaatagttaaaggttactaatttatgttctctcttcatcgtcttttttgtcttttcatgttttctcttcctttcaaatctctaccattataccagctctcactgtattttttttacagtacagaaagtttatttgtaattaaaatgtagttgagtttagcaccttttctttttcttttcagtttttatgagaatttaaaactcttcaagagttagtaatacttattttaagttttgcttcttttactttttttcctatttcagtctctaatctcaaaatatctgttctcttcttcaccattcattgtattctccttctagatttccattactaagtttacttactctttgccttactgtggcagggcaggtctcgctaacgcaggcctccataacaactgtttcagcactgactgagtggttaagttaaatgttgaaagctgatagagccaggctagaatgtaacaagcccaccaagagtttgcctaggcctttcctgggccttgaagcatgacaagattacgaaggaattcttaacaggacccgtttaggattaaaacaagtttattggggggtctgaagaaactccccaggccttcacaaacaagtttattgggggtcttctgaaggaactccatatttagcaggagacgagataagggtaatcactccagcacctggacccatttagattaagtaaatttactgaagctctagaggaaagccttcaggactcacatcttagtcacacattagaagaagttaatgacttatgtctttagatgaatgcacacttacacgtagacatatagcttagaaggtatattggctctggaaaactttgtaattttcagttggtctggcaaaaatttccaggccttctctctgtacctacttatataaataaaaactgtcttctttctcagttcatctgcatctcgttattgggccatgaagaaaagcagcccgattctcctacctcagcctcccaagtagctgggattacaggtgtgtgccaccacacccagctaatttttgtatttttagtagagatggggttttgccatgttggccaggctggtctcgaactcctgacctcaggcaatcctcctgccttggccttccaaagtgctgggattacaggcatgagccaccacgcctggccaggtcatatgttttttaaaggtctgtattgtcaataaaaactggaggcaaattggaactgagaaacatttttcttttcttttttaagttgcagtgcttgcaagcaagtcctgtcttcagaagaactggctcacttaataagagacatagcaggagtttaaggggcataatctataaagttggtcagtttgccaattattctcattggtggaaaaataattctccatcataattatatattggcaagggtcataacacatttgtatgacagtgaaacagcaaaataactaacatgaactctttttttgtttaaaggaccttcacccattcctgcatgtaagttaggacaattttagaacactaagataaaatgcaaaaacagcaatcatggaatttttgaaactaactgtacgactaagggggaattatgtaaacaactaattatgttttgttaaagatttacgggagcattgtgacctgaccaaggacaaagacgttcccaacctcctctgactcttgctggcatccagatctctgtgttcctcagtcatctcttgattctaactcctgcgcataatttccccatatcccccctcccatagaaaccctccagccagcctgaaagacattagaagggtggtactttagaatgctggttctccatcttctcggtttgctgactctccaatataatctgcttttcatcccaccaacccttgtctctcatgtctggcttttcagctgcaagcagccaaacctgggtttggttacttacatttatgtgtatcaatattgtaaaaatcagcactaaaattgtttccattaggaagccagcaatgtaaagcatatgaacttaagcctttattttaggttgcagtgctaaatggaactattattcaatttaagaacatataaagcaagttgtctgtccctccctccctccttctctccttcccttccttctggttttctttccttcttttttcacctcctgccatcctcagtttatctcatgatacaaggtttttctgactgtcatgtttaatgtcaagtgctcaggcaaaatagatgatttggctaggctaacaaagtattcattttgcagtatttccatttttttagtgcattttcttatgattttgaggaaattttgctttctctccacatttctattttgttccttgtattgttagtgcttttccttttctttaattttgtttcaaaataatcaaaattattctgttatttttaaatacttttcatttcattaatttttgcctaataaaagtaggacatttttattattgtgtcctactcttgagatttttccttttttaatcatcttgagctcatgtttagttcatcaatttttattaatgaataatttctattaaaaccatttaccataataatttctctctaaatgatattttggttgtatcctaagtgttttgacaagtaatgattttatactcacttatttctatatattctgtaatttctctcacaattttgtttgtaacctgtggattatttggatgtatgcttttttgtttctaaatatgtatatgttaatattttttgttatttatttctgttttgttgccttgtgctcagaaaatgtgatttatattatgttgaagtgtactttgaaattagttgaggcttgctctagttgaaggaattggtggtcaaggtaatcttttccatctgtgcttgcttggtggaatgttcagtgtacattactagataaagctttctaaaattatgtcaaagcctctctagccttactaatttttgtctgtttattttatgagagaaatattattaaaatatctttatttagttacagatgtctttgctattttgtcagtttttgttttatgtatttcaaaggctatgctataagctcacaactttcacttatattttatctgatatttgcacaattatatcaagttttgttttgttgttaattgcctgtttttttttttttttgagacagaatttcgctcttgtcacttaggctggagtgcaatggtgcaatctcggctcaccgcaacctctgcctcctaggttcaagtgactctccagcctcagcctctcaagtagctgggatgacaagcatgtgccaccatgcctggctaattttgtatttttagtagagacagggtttcaccatgttggccaggtgggtctcgaactcctgacctcaagtgatctacccgctttggcctcccaaagcgctggaattacaggcatgagccaccgcacctggccaattgcctggtatgttttaaaattccttcatttaaatttttctgtgtgtcaccttattttaggtatatttcttaatagagtttagctatttttcttatttttttataggaaaatagaaaaattaaaaaaatttaattcttttaattacatctgagagtttctagcttttaatctgtgagtttaatctactattgtataatattgtgctaagcaacatatttagacttttttaaccctcatttaaaaaaatttgctttttcacgcctgtaatcccagcactttgggaggccgaggcgggcggatcacgaggtcaggaggtcgagaccatcccggctaaaacggtgaaaccccgtctctactaaaaatacaaaaaattagccgggcgtagtggcgggcgcctgtagtcccagctacttgggaggctgaggcaggagaatggcgtgaacccaggaggcggagcttgcagtgagccgagatcccgccactgcactccagcctgggcgacagagcgagactccgtctcaaaaaaaaaaaaaaaaaaaaattttgctttttatttgctttctctttttcttttttcttgctttcttgtggactaatatagttttctttcttctttttattttccctatgggttcagaagatgtatgtcgcatttctattatattaatagttgtcttttatttttgccataaatattcaaatgtatatatttaataagatgaaaagttaatcagtacatctgaccttttgtcaaattatcttagttcataatcattagccttgtctctaaggtttttttccctaatgctttaggtctactcattttaaagcacactaatatatttctccttcactctctccttctccttcttttcttcctgcttttttttttttttttgacagggtcttgctcctaggctggagtgcggtggcatgatcacggcttactgctgctttgacctcccaggctcgagcaatcctcccacctcagcctactgagtagctgtgactacaggcatgcaccaccacactcacctgatgtttgtattttttgtagagacaggatttcaccatggtgcccagcctggtctccaactcctgagctcaagcaatccacctgccctggcctcccaaagtgcagggcttataggtgtgaaccactgtgctcagcctctttctgcttttccttctccttcttctcttccttctcttttttttctttatagtcaacattttagatttactgtcatgttttgttgatttgttttcttacatatgtttcttggttctaacttctttttgagtttttactcaaaagtaaactccctgaagtatgtccctttgataattctttcactggggacctgtgtttaatgagtttctatgttcttgaatatacaaaatgacttcatttcagtctcactcataaatgataattttgctgattgtatcttatgggtttatagtaattttccttcagtcttttgatgatattgttctgttgtattctttttaaaatttttttatttttaatttttatgggtatatagtaggtgcaagtaggtacatgaaatattttggtacactcatacaatgtgtaataatgtgtagtaatcacatcagggttaactgaatatcaccttaagcatttatcatttctttgtgttacaaacattgcaattatattcttttagttgtttcaaaatgtacaataaatttcctttgactatagtcaccctgttgtgctatcaaatattagatcttatccattctatctaactatttttgtacctattaaccattcccaatttttctctctcctgactaccctccccaggctctggtaaccatcattctactctctatctccatgagttcaatgttttaatttttagttcccacaaatgagtatggacatgtgaagtctgtggttctatgcctggcttatttcacttaacataatgaccttcatttccatccaggttgttgcaaatgataggatctcattcttgtttggatttcattcttgttctgttgtattctggcacatattattgctaatgagatgtctagtgttaacatgattttttgcaggtgatctgcttctctggttgtctttatgatttgctttttaatgtctgtcagcttactacgatgagttttggcacatgtaagtgtgtgtgtgtgtatatatctgtctgtgtgttttaaagttatctaatttcagctttcagtggaccattatgatctgaggatttatgtctcttttcttctggaatgttattaattattacatttaaaattattacctgacatttattcttttaattctctcttatcaaattccattacacctgacctcattctatttacagctcttctttttcatattttcaatatcttctgtgtgttattttgagctgagattttcaatattttccatgtactattttgaactgagatttcctcagttctgtcttccagtttactcttttaaactgtgattaataatatttaaatattatttacatatagttacattagaatttatatattatctaatcattgtttcaattctaataactttcttattttcaaggtttcagcttggttcttttttaaatctgcctgttctttcttcaaactatctctcaaatatatatacatatatatatatatatatttttaatctttttagaaaggatagtctttcttttattccccaataggtaagccacaacctatcagaactccagcctttcgtggccttttcatgctatactagctgtcatatgccgtatcagctgccttaccgtttaaaattttattatctccttcacctcctccatttaggcatttcttccctcctatcttatcaaggttacttatgacattcattttgcaaaattccttgtcagttcttactccaaaaattcattgcttagctgtttttgatgctgttgtttattttttccatattgaaatactatcttctcttgagtgctgcgagaccccccctttactggttctccttctttctccctgctcactacttctctatatgcatagttagatttttctcattctaaacttctaaaactgattaatccttaccccttcatttttacatatacctttgattatctaatttagtccaatcgtcttaaatgttacctatatgctgattactgtctaatttatttcccacccaatctctccctaaatcttcagactcaaatatttaattgccttttgatatagagtatatgcttggatggggggcagaatgtttagtgggatttttcttgttactcccaaattgacaagtaggatcacaaagctgaggaaaaagaggttataacttcccattaccctcctcagcaaactgaggtgagacaagccctcaggagggattgcagcattgccagctccataattaaaagggaaaggattcttgaggctgtgcagtgcagaggtgctgctcgccggccttgacatgatggccaaattagctctcctatctcaagtgtcaccctttttccaagacaacataagcaaacaactgtaaagggcaggagatttaagagtctttagagttgtgagtagttaacaaaggaatggtgttgtaggggaggaagaatagcgctttctttttctgaaggcaaatgagtagcactttgagatttgcttacagtgattgggggtatctgtgagaaaggatgtgtggcaacccatctcctggttgaatagtggatttgttgatttgttttgtgcctatctgaatgaaggaaaataaaattggagagagacagtagtgcagagtgtccttgttctgtgataaggattcttgagcctcctgagggttcagtgggcagtgcaaaatacatcctggcttgagccttcttgctagtatgtcactcaagtgggtggcctacttggtaagggcatctctgcagtacgagcaatgaagtgtattgctcgagagggagttgaggggctctggaattggcaagactagagtcagtactcccacatcagggactaggcatggtcgagttcttgtatgttcctccaaagaactggaatatgtattgtacaagacatttgggtgtctgctctagatgacatcaaaggacagtcagtctcaggttctcagagaaaagaacctacaactaacagaggaaggagattgcatgccccaaatccatcctctcagcctcaacagtgggaattataacaacggtgggaattatagcaacaaggagagtggacaggaaggggaagcacattgtatttctcctccccattctgagtcagtgtgcctgagacgggccattaggagaggagagggttttaaaggggatggcttaagcattttaaataatttagcataactagaaaattatgggttctaagacatcattaaatgataggaaggagacacatggcagagaacatgcttgaagcttgctaaggtcagattatttaattaattagtcctaaatgttccaggcatctagaaccaagcatacacaaaactgaactcacaatagcatcctataaatctgctcttctccactacctaaatcaataaatagtttcattcgtcaagtttcttagaccccaaatctaggagtaacccttggtgtcttctttttcccttaaaatcacattcagtcgaacagcaggccctgttggctttgcccccaaaataaataaaatctgaagaccttcttcccacttccactctgatcactcttctcattgccacactcacctttagtttcaggcctcttaactggtcttcctacttgccctcttgagccctcactctcactccagttaatcctccacaataatagagtgatcttttaaaattataaagtagaccctatcatttccctgttcaagcccttcagttacttctcatgatgcctagaatgaaatctgcaattttttattaaggactgcagggcccgacataatctggcttttgtcgctctggccctacctcctgctctgcctccttctttctagcctggctggctgttttgcacctccatagcaggcctgtgcatgttgtacttgttccttttgcctgaagcacactcccccttctataccatctttctttagtctgttactcttcttatttttctacatgaatttatctgcctgacatttactgtatgtttacttggcattatttgcctgttttatctcaacatataaactccttaagtgcaaggactttgtcttgctcatggctatatttccagtgcttaggataatgcctggcctacaataggccaatatatatttgttgaatacatatatttttaaaatgcattaatatctttgaagactttttcttttttttcctttagtgtttgacttgttcaatgctgttaggtttcttattttagtcttcttcagattgctctagttatatttctctgggttggaattctccaatttgttgggacttgtgaggtatcactcatatggtgctggattttctcatagatttcataacttttagtagtttcttattccttgggggctatctttcatggatattctatgatataaataccctgggttgtggatcccttcttggtggctattgtcctaacttcctgggtacactgccactgaaccagatctcagctgttttaacttggaatattatgcacactgcatgggtagcacacctccagcagggctctgcaccctggacagatctaactctggacctgtgtggatggctttgttttcatgcctggggcagatgggtgaagatattttggcttctccgcgtggggaggcagcgtgttttctgctcctggctttactccaagtggtggaattccagttttctacatgttgtatcttgaggctttgtccaccatctaggatcaggtgttgaaaccctacctttgttcctgaggcaaagctgctacctctgtttcctcatcccctcaccattcctcccaagagcttaactttagctttcctttctttatatgtgttcctatattccatttctgctccttggaaatcactcttaccctccttctttatgcttaggtatgactgtgcatttttcatttaaaaatatttccagccaagacttagccagccaaaaatgaggtgttataaaccctagttactttagcattccttttttctttctccctacccctcgggtattggatttttacattatttccctgcccatcctctttgatgactcctctgaaaaggacactatgcattcaatttgggttctgccttgtaatttctagctgtgagaccaataatcccttctcctgaactttggtgggccttggtctctgttcccaattatatggcccatgtgcaaacatagacatctggaatttccagcttcatttctgggtctcaaccactgagtatgtattttcatctgtgcagtgagaatacttagctgatcagcctctttgctcaggcttcagaaaggtatgtggatagggattttggagagacactcacttataattctttgttgacagttccatttctcttcactcaaataccaatgtctttgtcctaacattattgaaattaataaaatgttgttattatgaaaactatatccagagtgtgtttagaaggaactggaggaggatatataagcatatttgaaatctgttagaataacatagatgtctttcatgtttaaaaattggaaaattttacctactatctggattaagtgagatgcttcttgcatgaagaggttggctggagctgggcagcagctaccttcttcagactatgcgtgtcctcccagtttaacacagttcccaggagactcacctcaactcgctcatttactgacctgcctgggctcttttggcatctgcgtttttaaccttgacaggaactttgggttttaatattaatgtgatttaatttcaggatgaggaatctcggctgatattgggtttgcttaaatcatttgtaactgagatatgagaacagatttgcattttggaaaactaggacacagtgtgaaaggtgctttcacgaattctatattaaatatcatcatggtcaacgcttgatctggtttaaaaattgagtcactgttggtatgtgttaccttggaagttgggtttagaactaaaataatggggctgggcgtggtggttcacacctgtaaacccagcactttgggaggccaacgcgggcggatcacttgaggtcaggagttcaagaacagcctggccaaatgaggaaaccctgtctctactaaaaatacaataattagctgggcatggtggcttgcacctgtattgctagccacttgggaggctcaggcaggagaattgcttggactcggcaggtggaggttgcagtgagcctagatcacgccactgcactccagcctgtgtgacagagtgagactctgtctcaaaacaaaacaaaacaaaaaaacctaaataatgggaaatattacagttatgaatcaaaaagtttgtcttgcagtcctaatctggaggactttgggtaatgtagaagcaaatgaatatgagaaatatgagtctcaatcttttggatacttagaagtggaaacatctaacataaatctccacatatgaccagctgagaaataaagaacttacttgcagttctctgcgaaattactaaaaaataagcaaaaagaaatccatttaatttttctcaaatggagaaaacatagcattatctaacatattttgttggagtctgtgaggggaggacttgtgtgggcaaagaaggaagcattccaaaccaccctatagattagttttagattagttttacaatgcaaaactagatataagattaggcagtgatgatgtgatgaaatcaaaggtagggtttccttaaaggccctcttcatttactggacccaacagctttgggtatagtctcgggtagagactgccatatctttctgtttcctttgaatagcattataatgtttgagagaacactgaaagcctctctccatttaaacatcattatggatttcatctctcaataattctgcttacgtgttatttcataatattgttcagtttattactgatgaatcctagcttagtccctcttttaattagtgtttaaaaagattctctgtaatatagaccatgtagggtaataaggaagcaagggaataatgggaaccacaaatcactttgacagaagtgaagtgaaggggaccaaagagaaccaaagtagaaaaagacatgtaatacttacttataggtgctgccagctgacctaaaaaaattagatatcagtgaagatttgtttgaaaggagcaagtttccttctagggagagatatttgtgttggggagaatcttggtagtcacacagctctggatgacaatggctaattctctgttaaaagctccaattctttatgactgcattcttgggtaagtatttgggtcagtttcttatctcttacaaaggggttagtggagtgattctaaggattaaatgggattatgtaattaaagcacctatataattctataggaggtgcaaagtacatatgtgtttgaaatcatgtaaatgtaagcttccttctcagggagaagctagattagcagagggcagaggaaactgggagctttgagtcaggtagctgcacacagagttagaaatgagtagggtaggccaggcgccttggctcacacctgtaatcccagcactttgggaggtcgaggcaggcggatcacgaggtcaggagatcaagaccatcctggcgaacactgtgatgttctaaaaatacaaaaaaatttctcctccctattctgagtcagtgtgcctgagactggccactaggagaggagagggttttaagaggggttggcctgagtgtttttaataatttaacatgattagaaaattatggtatgctaccaggctacagtaagcaaaacagtatggcactagtaggaaatagacacatagatcaatgcaacagaatacagagcccagaaataaggccacatgactacaactatctgaactttaacaaagctgagaaaaacaagcaatggggaaagggcttcctattcaataaacgatactgggataactggccagccatatgcagaagattgaagctggactccttccttacaccacatacgaaaattaactcaagatggtttaaagatttaagtgtaaaacccaaagctataaaaaccctggaagaccacctaggcaataccattctggacataggaatgggcaaaaatttcatgatgaagacaacaaaagcaactgtaacaaaagcaaaaattgacagatgggatctaattgaactaaagagcttctgcccagcaaaagaaactgtcaacagagtaaataggcaacctacagaatgggagaaagtttttgcaaactatgcatctggcaaaggtctaatatccagcgcctgtaaggaacttaaacaaatttacaagacaaaaacaatcccattaaaaagttggcaaaaaaagggaataggcacttttcaaaagaagacgtacatgcagctcacaaacatatgaagaaaagctcaacatcactgattgttagagaaatgcaagtcaaaaccacaatgagataccatctcgcaccaggcagaatggccattatcaaaatgtcagaaaataacagatactggggaggctgtggagaaaaaggaacagttttaccttgttggtggcaacgtaaattagttcaaccattgtgggaaacagtgtggcaattcctcaaagaccccaaaacggagctaccattcgacccagcaatcccatttctggctatatgcccaaagtaataaaaattgttctatcataaagaaacacacgtgtgtttattgcagcactattcacagtaacaatgacatggaatcaacctaaatgcccgtcaacgatagactggataaataaaatgtacatatacaccatgtaataccatgcagccataaaaaggaacaagatcatgtcctttgcaggaacatggatggagctggagggcgttatccttagcaaactaatgcaggaagagagaaccaaataccacatgttctcacttacaaatgggagataaatgatgagaacacatggacacagaaggaaacaacaggcactggggcttattgaagggtggagggtgagaggacgtagacagacaggaaaaataactaaggggttctaggcttaatacctgggtgatgaaataatctgtacaacaaacctgcatgacacaagtttacctatataacaaactgcacatgtatccctgaacttaaaacttaaataaaaataaagaaagcaagttgatactacttatcataatatttccttacaagtaaataaaggaaagctaaaaaaagccaaccaaagacataatgaaatattatttggccataaaaagaactgaagtactgctgcatattaccatgtggatgaacctggtgaaccttatgctaaatggaagaagccaggcacaaaagacctcctattgtttgattccatttatatgaaatgtccagaacagctgaatctatagagacagaaagaagattagtggttgcctggggctatggtgtggagagggttttgggttgggggatagtgggaagtgattgctaaacagagtttttctggggggtgatgagaatgttctaaaattcattgtggtgatggttgcacaacccagtgaatatactaaaaagcattaaattccacactttaaatgagtgaattatgtcatatgtgaatatcatctcaataaagctgttatttacaaagataaaaaagataaaattatgggttctaatgcatcattaagggacagagaggagatattttccagaaaacatgcttgaagcctgctaaggtcagattatttaattaattagtcctaaatatcccaggcatctagaacctaacatatgcaaaactgaactcacaatagcatcctataaatctgctcttctccgctacctaaatgaataaatagtctcattcgtcaagtttcttagaccccaaatctaggagtaacccttggggtcttctttttcccttaaaatcacattcagtcgaacagcaggccctgttggctttgcccccaaaataaataaaatctgaagaccttcttcccacttccactctgatcactctctccttgccacactcaccttaatttcaggcctcttaactggtcttcctacttgccctcttgagccctcactctcaccccagttaatcctccacaataatagagtgatcttttaaaattataaagtgggccctatcatttccctgttcaagcccttcagttgcctctcatgacacctagaatgaaatctgcaattttttattaaggactgcagggcccgacataatctggcttttgtcgctctggccctacctcctgctctgcctccttctttctagcctggctggctgttttgcacctccatagcaggcctgtgcatgttgtacttgttccttttgcctgaagcacactcccccttctataccatctttctttagtctgttactcttcttatttttctgcatgaatttatctgcctgacatttagtatatgtttacttggcattatttgcctgttttatctcaacatataaactccttaagtgcaaggactttgtcttgctcatggctatattttcagtgcttaggataatgcctggcctacaataggccaatatatatttgttgaatacatatatttttaaaatgcattaatatctttgaagactttttcttttttttcctttagtgtttgacttgttcagtgctgttaggttccttattttagtcttcttcagattgctctagttatatttctctgggttggaattctccaatttgttggggcttgtgaggtatcactcaccactcacatggtgctggattttctcatagatttcataacttttagtagtttcttattccttgggggctatctttcatggatattctatgatataaataccctgggttgtggctctcttcttggtggctattgtcctaacttcctgggtacactgccacttaaccagatctcagctgttttgacttggaatattatgcacactgcatgggtagcacacctccagcagggctctgcaccctggacagatctaactctggacctgtgtgggtggctctgttttcatgcctggggcagatgggtgaagatattttggcttctgtgcatggggaggcagtatattttctgctaccggctttactcagaggggcctaatttcagttttccgcatgttgtatcttgaggcttttgctgtcatttgggagcagatgttgaaaccctacctttgttcctgaggcaaagctgtcatctctattttttcatcccctcactgttcccaccaagagcttaactttagcttcttcttgcaatgtgttcctatattcaatttctgctccttggaaatcttacccaccttttttatgcttaagcttggctgtatatttttcatttatagatattgcccggtaacactttttaaacttttattttaaattcagggacacatgtgcaaggttgttatataggtaaacttgtgtcatgggggtttgttgtacagattattttgctacccagatattaaatctagttatttttcctgatcctctcccgctcccaccctccaccctctgacaggccccagtgtctatttttcccctctgtgtgtccatgtgttctcatcatttagctcccgtttataaataagaacatgtggtatctggttttctgttcctgcattagtttgctaggggtaatggcctctagatccatccgtgttccagcaaaggacatgatctcattcttttttcggctgcgtagtattccatggtgtatatgtatcacattttctttattcagtctaccattgatgggcatttaggttgattccatgtatttgctattgtgaatagttctgtgtttaacataactgtgcaagtgtctttatgatagaatggtttatattcctttgagtctatacccagtaatgggattggccagccaacacttagctatccaaaaagcaggtggtataatccctagttacttttgcgtgctttttttcatcccctctactaggatgatatataggatccaagaccctatatatctattgggtcttggatttttacatctttttcctgcccatactctctgatgacttctctgaaaaggacactatgccttcaatttggattttggcttgtaatttctagctgtgagaccagtaatcccttctcctgacttcaggtgggcattggtccctgtgcccaattatagggcctattcccaaacatgggcatatggattttgcagcctcatccctgggtcggaaccattgtctctgtatttttatctgtgccgtgagaatacttagccgatcagcctctttgctcaggcttcagaaagatgtgtggatgaggactttggagagacactggctaattctgtgttaatagctccaattctcctctctcaaataccaatgcctttgtcctaacattattgaaatgagtaaaatgttattatgaaaactgtatccagagtgtgtttagatggaactagaggggagtatgtaagtatgtttgcaatctgttagagtaacccagatgtctgtcatgtttaaaacttggaaaattttacctactatctggattaagtgagatgctttggcaactctgaatctgaattcttgcatgaagaggttggctggagcaggcagcagctaccctcttcagactatatgtgtcctcccagttttacacagtttccaggagattcacctcatctcactcatttactgacctgcctgggctcttttggcatctgcatttttaaccttgacaggaactttggtttttaatattagtgtgatttaatttcaggctgaggaatcccagcgatgttaggtttgcttaaatcatttgtaactgagatatgagaaccaaatttgcattttggaaaggtaggacatagtgtgaaaggcggtttcacgaattctatattaaatatcatcattgttagtgcttgacctggtttaaatattgagtcactgttggtatgtgttaccttggaagctgagtttagaactaaaataatgggaaatactacagttacgaatcaaaaaggttgacttgcagtcctaatcttgaagactttgggtaatgtagaagcaaatgaatatgagaaatatgaggcacttagaaatagaaacaactaagataagaaaagtccccacatatgaccagctgagaagtagagtacttacttgcggttctctgtgaaattactgaaaaataagcaaacagaaatccatttaatttttctcaaatagaaaacacatagtattatctaatatattttgctggagtctgtgaggggaggacttgggtgggcagtgaaggaggtattccaaaccaccctatagattatttggttttagattagttttataatgcaaaactagatgtaagatttagcagtgatgatgtaatgacgaagtcaaaggtagagtttccttaaaggccctctccacttattggacctgaacagctttgggcatagtgttgggaaaagaccactggatccttgcactataatgtttgaaagaacactgaaggtttctctccatttagacatcattttggatttcatctctctctctctttctctctccacccccctgaaaattcctcctactatgaaataatatttcatagtattgttcagtttattgttgatgaatgctagcttagtcccgcttttaattagtattttaaaaaaattatagggcaagcagggtaataaggaagcaagagaagaatgggaaactcaaatcactttgacagaagtgaaatgaaggggaccatagagaaccaaagaagaaaaagagatgttatacttacttatgggtgccatgggtggacctaaaaaccaaattagatattggtgaagatttctttgaaggaaacaaggttccctctagggaggtatatttgtgtaggggagaaacttggacacctttctgggtctaaattatgattctatgactatgtattcttgagtaagtatttggctcagtttcttatctcttacaaagggattggtggaattattctaaggattaaatgaggtaatgtaattaaagcacttaaatagttctagaggagatacaaagtaaatatatgtttgaaattatgtaaatataacttctttctcagggagaagctggatgagcagaaggcagaggaaactggaagctttgagtcaggtagctgcacacagttagaaatgagcagggtagagacaggtctctaagccttgcagggaacaacaagaacaacaacagaaaagagtagaaaaagaaatggaacttaccgcggggtgctgaaggtggaccagctgaaaaacagagaggtatcttagcaactgttttttctcccatgatattttcctttctatgtagagagtttcttcttggtaggtcattataacaatagggaaaactttccctttggtattcatttatttttaatatgaatcagcagaatgtgaactttcaaaaaatcattaataacttcatggaattttgatgataggaaagtaagtggttaaagtagtatgcaccccaagcctggaaatcttagctgtaccagggaaaggagagattccagaatcctacggtggtgaaaacatggacatactgatggcaagtgaaatgaatccagcttgcaactagaccagaaacaattatctcctttttctttccccattgctcaaattgtctttcagtttgttaagtcccttgtaatatatcattttgacctgctgataaactttctccccttccctttattttttaataaaatagtaagtttgattttttccatagagttatttaaaaggtgagagaatgatgtgtcacatgaaagcaaaacacggaggaaataacaacttaaagttgttatttaaagtttaggcttaaatcctctaaagtctctaaaaggtgatacaaatttttcttagatgttttggaatttaaatgtggaaaaaagagaccagatatggcaggaggttcaaatgaaaaagggttatagaaacttcttatctactcctttctctcctaccattttttccctttttaaggtagtctcttgttgatgggctttgaaattttgtaaaatttttttctctgctctgacttatctcttccctttttgcagtgactggtaactgcttgaaatcctgcaggggattgtaaattgatagtcttaaaactttccagtacatcatgaataatgcagagaggttttgataatgagacagcaagaggccaagatatatctcaagccctttgtatcccaatatgggcagataaagactcttggactccactagagaccaactgagtcctaaaggagagaattcaatgaacacatagacttactgattgtgtgaggatgcgatctgactgaaaaacaagcaaagatactttttgttacccctttcttgtttcttttcctactcatttttttttctattggtaaatttactagtgatatacttgcttgaacatttttttttaaatcaaaggcactagaaatttccagaaaactaattatcagctggttgaattctggataatggaaaaacaaaaggctgagaaaatagaacttcaagttccatgttgcaactcaagttccaatagacatcagtggactttgataaatgcaccacagagaaacaaataaataactgactaattgcctgtatagatgacttatctagaaagcagaaatggatctatatcatttttctgtcattttttttccttctgcatggaaagttcctaacattctttagagtcatgtaaaaacttttttctcaggtctttattttttatgcgagtcagtgaatgttctagaaacttattaataatttatttatgcctttctgcccatggatgccacggaagaagcatcattaaagtctctcttctcctggccgtcttatctaagtcagagtctcctaaagagccagaacaactgaggaagctcttcattggagggttgagctttgaaacaactgatgagagcctgaggagccattttgagcagtgagggacactcccggacagtgtggtcatgagagatccaaacccaagcgctccaggggctttggatttttcacatatgccactgtggaggaggtggatgcagccgtgaatgcaaggccacacaaggtggatggaagagctgtggaaccaaagagagctgtctcaagagaagattctcaaataccaggtgcccacttaactgtgaaaaagatatatgctggtggcattaaagaagacactgaagaaatcacctaagaaattattttgagtagtatggaaaaattgaagtgattgaaaacatgactgaccgaggcagttgcaagaaaaggggctttgcctttgtaacctttgatgaccatgactccgtggataagactgtcattcagaaataccacagtgtgaatggccacaactgtgaagttaggaaagcctgtcaaagcaagagatggctagtgctccatccagccgaagaggtcgaagtggttctggaaactttggtggtggtcatggaggtggtttcggtgggaatgacaactttgatcatggaggaaacttcagtggttgtggtagctttggtggcagctgtggtggtggtggatatggtggcagtgaggatggctataatggatttggtaatgatgggagcaattttggaggtggtggaagctacaatgattttggcaattacaacaatcagtcttcaaattttggacccatgaagggaggaaactttggaggcagaagctgtggcctctatggtggtggaggccaatactttgccaaaccatgaaaccaaagtggctattgtggttccagtagcagcagtagctatggcagtggcagaagattttaattaggaaacaaagcttagcaggagaggagagccagagaagtgacagggaagctacaggttacaacagatttgtgaactcagccaagcacagtggtggcagggcctagctggtacaaagaagacatgttttagacaaatactcatgtgtatgggcaaaaaactcgaggactgtatttgtgactaattgtataacaggttattttagtttctgttctgtggaaagtgtaaagcattccaacaaagggttttaatgtagatttttttttgcacccatgctgtttattgctaaatgtaatagtctgatcgtgacactgaaaaaaatatatatttgtgttctgagtaatggaaaaataagggaccaaggaaattggaacattatcatatcacaatgtggatgcatacattttggcttaagatatgttagacactgctggagataattgagtttcactcatgaagggaaatggtcaaacttacaagaggatcctgtagctgaaaaacaaagataaatcaacgtgtacagcctgctgaaagaggagctagttttcgtactactttcctgaaaggaaatatcagaaatggcaatggaagaaacatccttcttagggcaagggcatagagcgctgtgctggggaatatacctgccatcatgccttgtggggattctgccttctgcttagtataggaggctgcaggaaagggagatgattgatctcttccctttttgcagtgagtggttactgctggaaatcctgcgggggattggtaatttctttaaactgtgctgcctttacctttcttctccctatttctgccatcctgtgaaagctttcatttattcatacaaatatccttcccttcccttgttgacaagtcactataaacttcgggtagtttccgaactttatctctctattttgggtttggtattctcctttattcattccttataggagtggagcagcagctaaatagaggaataagcaaaagaaatgaagaaatgtgagtttctacacacacaagacagaaatgagcaaagaggaaaagtatgccaggccctataggaagccaaaggcagctatcatacaatagacatggaacttaaccagtcatttctgaagtttcatctggtggtaaaaaacggaaggaacacaaaatggagaaatcaacatgtgtagaaccaagtgaattcagttctcccttgataggcttaaagagggtaactgcagagaggatatggggggccctaaaatctgacagctcagtgcatgtccggccttacgtgccttactttgtgctttgtagcctcagacctgtttctgctggtctgaggcaggagattggctataaagtggtaaagtgaggctttgttcttccttctcatttcatttaggaacagtaaatgcttgaaacacttctagaggttcataatgtcttaaacttatatgtacttttgtcagtctcattttctttttcttttattttctttctttcttttttttttttttctttttgagacagagtcttgctctgttgcccaggctggagtgcagtggcatgacctcagctcactgcaacctctgcctcccaggttcaagcgattacaggtacctgccaccaagtctggctcatttttgtaggttttttttttttgagacggagtcttgctctgtcacccaggctggagtgcggtggcgtgatctcggcttactgcaagctctggctcctgggttcatgccattctcctgcctcagcctcccgagtacctggaactacaggcacccgccaccatgcccgacttattattattattatttttttgtatttttagtagagacagggtttcactgtgttagccaggatggtctccatctcctgacttcgtgatctgcccgccttggcctcccaaagtgctggattacaggcgtgagccaccagtgcgccgggcctaatttttgtatttttaatagaggcgcggtttcatcatgttggccaggctggtcttgaactactgaccttaagtgatctggcccacggggcctcccagagtgctgggattataggcgtgagccactgcgcccggcctcatttttttgtgtgtgtgtttttgagacagagtctcgttctgtcgcccaggctgaagggcagtgacacgatctcggctcactgcaacctccacctcccgggttcaagcgattctcctgcctctgcctcctgagtagctgagattacaggcgtgcaccaccacgcccagctaacttttgtattttttttttttagacagagtctcactctgtcacccaggctggagtgcagtggtgagatctcggctcactgcaatctccacctcccaagttcaagtgattctcctgcctcagcctcccaagtagctgggactacaggcatgcgctaccatgcctggccaattttttgtatttttagtagagacgaagtttcaccatgttggccaggctggtcttgaacttctgacctcaagtgatccacccaccttggcctcccaaagtgctaggattacaggcatgagccaccttgcctggccaaatttttgtatttttagtagagacggggtttcaccatgtttgtcaggctggtctcgaactgctgacctcgtgatccacctgcctcgggctcccaaagtgctgagattacaggcatgagccaccatgcctggccctggcctcattttctttagtcactcttgttcactaaccttttaattaattaattatatttaagaggtacaagtacagatttcttatgtcatatatggcatagtggtgaagtctgggcttttagtgtacccattacccaaatagtgaatattccacccaataatttttattgacttgaaaagctttcttcctactcttctttactagggctgttgcgagccactaatttttgttaaagtcatttaaattttaatcagttcattttgcactttctccaaatcgcttataacttaggggaaagctagaaaggaataaaatagcaatatatttttcatttatacactatcatatttttaaattgtttacacataagggagagggagtcaagcaggggagaaaagggaaagggaattcatgtatccatgtagattctctggcacatggtggctattagggaactgtggaccagatgtgacccttcctttagccccagtgagatcctctgaggtgagctggcttatgtttatcctccctgtaataattatgagaacttccaaggctataagtcttggcaatctgtgagtactgagaaaagcagtcttgattcaggggaatagtcaataacaaatggctcttattcattcacaaaaaggatagttagaaccagaattcagggcagtaaatatccagttttaatggtcgtagtgtggttgtgtgggatgctgcctgccctctacacattttgggtttgttttcccaagttatcttataggactgtaaactccatggcgtcagtgaccaaccatatctttctctcccttattcatgactttatcctcagtgctcagcttagtatcagatacatggtaggagctcagctagatgaaggaatgtttgtttgaatatatgtgacttgccctctgataattcttcctgcttgacttaaactttctaatgctatcccttaatttctagattcagaatttcccgtgtcctggggttggttcgatgccctagattttaacaccagtttctccctagctcgtcacaatatgaactttcactttattctcttccatatgtgatgcttctgccagttcctgtaaattacagcccaattactgttatatcctgttccatgaggtgctctgtcctatctttcttttcctctctctttgtcgtgcgtgtgtgtgcgcgcgcgcacgtgtgttggggatgtttggagatagtgagccggataggacatgaggaaagagaaaggcctttggagagaagactggagaactcaggttagactagaccctgcatagtatttcctgttaaattttgttgtcttttctcccttttgtatttattcttaaaatttgattttcttttctcatttcctcctcattgtctcctccattatctttgagtaggccctttagaaactacaaagcacttcagaactggaaagctgcccttattattctctctctgctactttagaaaattcttgtatattgttatagaagacattatgactatttctggggacattttcttactctttttcttttaaaaaaaatagccctggagaattctcagtaggttgaaatcaggaagcataaaaacatgtgtaaaataactgctcttatggcagtgagacacatctagggcatttgagacagggaacaggccctctagacactgtagaagatcaaggaacctggagggagaaggatagataaggtacttaccattggatccaggatattgtactaaaaaatagaaacaaacaaattaaacacacacacacacacacacacacacacacacacacacttctattttttgagacagagtctctcactctttcgcccaggctggagtgtggtagggtgatcttggctcactgcaacctccaccttctgggttcaagggattctcgtgcctcagcctcctgagtagcagggattacaggtgcccgccaccatgcctggctattttttgtatttttagtagagatggggtttcaccatgttggccaggctggtctcgaactcctgacctcaggtgatccttggcctcccaaagtgctgggattacaggtgtgaaccactgcgcctggccccaaaacacctctattagtgatattttccaaaggcaagcagtgaaaatgattttctcaggaattactaaatctaagtattcaggattaaatatttttcactgcactgctgctgtactctagcctctccataagaaccagatcttcttttaggagattattaaccctgttttagcataaccacttcattcttgcttttcattataggtgttggagatgagatccttaattgtattcctttccatattcccccagtgtttttcctcagatcactctgtttcactctcagctatctttatgttcttgttcatttcttatattcttttccagattcgattacacctttgccttaggaagttattctaatgattactgacaagccactataatcattattagaacaatgcctatctattatgaattttaaggtaatggaatttccattttctaaaatataattggttgcccagagagatggttagtgttaatccaaactgcaccattttgtaagcctccagcaatttgaagaccttggtaaaagtgaaacattccacgggggttcgggctgtgagaaacattctgcctaaccacctgaacacaaggtggacaaagggccaactaaagaaacatccctgtcatattcagctgggagaaagtgcaaggaacactacattctgcaggaacaagggccagaaccccctcatcatgggaacatcttatcaatatcctgccggccagcaagccatactacccagacccctcccgcctatacctataagtacccccgcctgtaagcagcagtgggcactggcattaggctggttccccacttctgtaggtcttatgctggacataaagcctacatttgctgtacagccgccactctctctgtgtcttttctttaaccctcgccttccctccaaaacctaacagttacgatatggggaaatgaaagtctaagaaatatgattttcagcttctttaacccagatacttaaacagttggagccagtctccttcagacatagtaagaagccagtagagataagttgatatatacaggcagcttaccaataggtcctagagtttgcactaaaaagaaattcaaattggcatattagtacagttatttggagagtgtatttttcactaattttatcctagaagtgaggctttgagaggtagagcaggggagaggaagtgatatcagttatgagatcattagggagacttaatccaactatattaactatagaaaaaaggaaaaaggatatttagcatttactgcaatatttcagcccaaggtgaaggtttttataggatccttgccaacctaagggatactagggaaaggcaaaactttgttattaggtattaacattactgatggtagggaaaggtgaaacacttcccgtcagtaagagtagaagatatttctttctcaagggactgttctttcactaaaatctttatttctgatcaactaatatgttccagaggtagacattagaataggaggtaagaatctagtttcttcttctcacagcttccagcttattggagagtgatagagcagtgactgctgctttgattagctttagagtctgtgagcaaagagtcaacaaaaccttctgtttttttttgttttgttttgttttgttttttgagataaggtctcactctgtcacccaggctggaatgcagtggtgcaatcctagctcactacagtctcgacctcctgggctcaagtgatcctcccacctcagcctcttgagtagctaggactacagctgcatgccactattcctggctaattaaaaaaatttttgtagagatggggtcttgctctgttgttgctcaggctgatcttgaactcctggtctcaagtgatcctcctgtcttagcctcccaaagtgcagaaattacaggtgtgagcccatgcctggccaaaaccttcagtttttaatgagaatttggccttcagttgattttctagctctgatcgcctggtgacctgataaatatcgaaagcctgttatgttttttttgttgttgttttttttttagacggagtcttactctgtcgcccaggctggaatgcagtggcatgatctcggctcactgcaacctctgcctcctgggttcaagcgattctcctgccttagcctcctgagtagctgggactgcaggcgcacgacaccacacccagctaatttttgtatttttttaagtagagatggggtttcaccatattggccaggctggtctcaaacttctgaccttgtgatcccctggtcttagcctcccaaagtgctgggattactgcacccagccgaaagcctgttatgttatttagcaacactgcttacataagaatgatccttgatgttagactgcatctgaactgggagaattgtaaatatgtattaagaagccataactttgggcttccctgagtgtagtgacccatgtatttggtcatattccttacgggatccctgcaggtaatgtgtatggggttcttataggagattttagttcctggtggatctgtggggtttctaagctaggtcagctcccaactcaactgacagaaggccaaacagaataggtcctaggtggctatgtggacacctgcatagatcatggcgagtactactcccacagcagagggatagctgttaatgcccttgctggcaaactgtgcttcctcccttaggtcctactgagtagactgttcccagatgagagctatggtaatcttctaagtctgcgtggttagttgaatctaaaaagaccatatcttcacccagtgggcattgcagttaataatccttcacttcagtgtcactcagaatgagaaatatccacattttgatcaataatcctcgaacttttaactctgaattttttttttcctgtgtaaaacacctggaagatggctttccagatctggatacccttggctatgagcagtaaaccagttacacatttagatattatgctaacttaatagttgctttgcctgtatctacaaatatgtatctttgattctgaagtagaagtcttatgatacctgccctcttgacataagttactaaatccttggataggtgatcacttcaaaattttgtttcttcagtttttctatattttcttccttcctttccagtttcaatttgtgactttttgtacctttatttttattctctttctcaacatactcatttcccttctttattctcttatgtgccaattcacttactctttctgcttccaattttcttcctacttttgttctttttaaattttctcctatttatctctctctaaactgcatcttcattctgtatctgttattatttgttactcattctctcactttttctcctctaggcctttactaccctttaatctcaatattagaacttcattttattcattgttaataacctgttataacacccaaaaatgatagtggaaagaatgaagagttagtaaaacttcagtcttaattttattaactaacccatcctcttatttttttgagaaatgactcctgaccctcagtttcctcatctctaaatatggggataataactgccttactcattgccatttgaatgttgtttagatgcaataaagtaatgtacgcgagggttaaaaaaacagtagtaagacattatagggatcactcaaagaatgtgactaggttgctaaaagttgctgaaaatagagcctaactcttctggagagaacttttcagggcaattagaaaggaaaggaaggccaggcgcagtggctcacgcctgtaatcccaacactttgggaggctgaggcgggcggatcacgaggtcaggagatcgagaccattctggctaacagagtgaaaccccatctctactaaaaatacaaaaaaattagccgggcatggtggtgggtgcctgtagtcccagctactcggtaggctaagacaggagaacggcttgaacccacgaggtggagcttgcagtgagtggagatcatgccactgcactccagcccggatgacagagcgagactccatctcaaaaaaaataaagaaaggaaacttaaaatttgcattattttacaaagtgaagataatctaataatggaaaaattatttgcatggaaagcacagcaggaagtttaggtgctgggttctaagtctttattaagtattggctctacagagctagattatatgctgaagtggaaacagcttaggaccatctctagcaggatatttttcactttgcatttcagcttcatagttaatatatttttattgcagaacctggatgagtccaatctggagtactgggtgagattatgaggtggcagaaggacttgatccttgagtccttgggcatgaataattgaaataaaaatagattgatgttctaagtaaagtactaaaaggcattataattgagaatcagatgacttaccaatggttttttgagagagctctaaaaaaaaaagagaaaagaaatcagtagctatatatatattttatatatactttttatttatatactttaatttgtatactttccctagtaggaatctgcatcactattgtcaagttcagctgcagttgagtagtagaaatggtgactttcttgctatggcaaactagtacatataagggcctcctcatctaaaaatcccttgtgtgatgctgagaagccattggaaatctgcaagggttcattctccactttgtagtttgtttttattggtgaggtgtacattcacacagctaatcatgacttactgaaatgctaggttgaagaaaaataagggttgaagaaaatgtgaactccaaacccttgaaatcccaacatggaaaccaggtagcgatccctaagatactgcaggaaagtaaaatgctcactgtggagaatcagagagcaaacttactgaaaggtcctgtagctccggctgtgagagagaaagagggagaaagaaaaagatatcagtatgcttcaccactgtgaaggaaatttccatttcccaacactcgctctagggagtatcataaatagaaacaacgggaagatcaagagttgcttgtatggcgagcctcaggcaggctccctgcacaatataagggacctacaggaatggaggcctcctcctgctttcagtgatggttgaaaatcttcagagggttgggaaagactcactccatattaatctgttatgcctctatttttcttcttacattttcttgccccttgcccctagtttccttagagacatggtttatttgaaaggtgtaccttcccttgctgatggatcattatgactatttctaagagggctgttttggtttatatttttaaatgttagcctgtgagatttcttaacacttcgtgcatggcctctttggaaactatgtaataggaatgccaggggagttgagaaagacagtgttaaaaaagcaagtcacccctaaacctcagcatcacacaatatacccattagcaaacctgcatatgcaccaccggaatctaaaataaaagttgaaattatttttaaaaatgcagggcagatcaggccccaagaccttgtaggtcagatatcaaagggaccagagtggaaaaacaaacttgatacttacgaataggggctgtgaattgcactgaaatacaaaaaggaggaaagtgtggtttgacattaatagaattttcattttaccagtattgtttctaaagaaactatgaagcaattcaaccagaggagaacaactactgtgggactgcagatgatcttagcctggaagctgcataaccctcctaccagatcaaatcattcagcatccatcttaaatgagaaatttaagtaactaaaaataataaatataaataattaaaataaactacagttttaaacatgaattatttggctttcccttgtcctaaactcagtagcaattcaggatattgtgtctgattgcttgggcatcagaaggtgtcagaagatttgaatacaattaagaagtatgagtgagaaatcctgcaggggtagaaatggtaacagttaggatgtggagaggaccctatatcctacagaaggccaaagaacattagaggaaacagaaaaggaactcacttataggtctaatagttccagttaaaatatggaaaaaacaaaatagaactaatgagaaaatactgtttgcatttaaattcttcctgggaaaacatcacaaatgtagacaccaggagcaaaatttccacttcagtggaggaacaaattaagtttataaatgcttctttcttcatcttggaggatcccggttactggtggaatctgccagctggaactgtggagacgcacatttggtcaggcagcgttccttcccctttccccacgggtgtcctgcttgtatctcaggagattacacaggccattgcctgtcttccagctggctaatttgaacttgcttagctagaatctatagcctcatctgaaggagacagtgggaattgctgtctctgtagtgattttggcccttattcaacagagtaacttggcctgccatgtaaaagggaatagaaactgctaggttgacttaagacatttataggtatgagtgttgggcaaaggaattgagacactagacccacatacttgttaataatgcagtaacagtcttcttctttatgaccacacacacacatacacatacacacacacacaccccaccacacctctctacacctcataggctataagtgattctctcaccttggcctcccaaagtgctggggttacatgtatgagccactgtgcttggcctaatatgtgcttttatgatacctacccagtatttgctctcaaagtttgacttgattattttaataatgttccatttgtgtaaataatccaagaggagtagacacaggatgtgatataccatgagctttaattatcaaatcactttttttctccttccttcagagttagtcctgtctcaggggctcaagctctgaacatcctcaaaaatgaaggatagaaatgtgttaagaagtgaatgaaaccctgatgagtttcatctttcttgtctttggctttaaggtcactcttggtgtggggaatctgcagggctggaaaagctggttaaatttggaccaagtgcattcatctttttatttcctctctcagggcagagaattaaaatcctgtagagcaatggttcttaaactttggtatgcacgcaaatcacctgggaatcttattaaaatgcagagtctgatttagtaggtcggggtgggcaataggctgagactctgcatatctaaaactccagggtgacgttgatgcaggcccttggacccactttaagcatcaaggccataaagggctggcaaaatctcagatcatataaaagtcattgtttccatttaccattttttttcctttttaaatcaacttcctctcacttattccttattctctattcccaaccagtgcttcttccagagatatatgctacagtttcatttaaaattctatctggatacttatttcagatttattctttgttcataacaggggatatacatcccacacaaacatcagtgacagtctgggatcctcggtcagtgagctgggactcactgcatgtcactgaaattttcttggtgggtcttaagtagaatggccaccatcaagcctctttctttgagtgttactgggttttctcacaggggaatctttcttcctttcacttgaccattttttgttcttcactcttttccctttgctgttgaatctcaagatttcggaaaagttaaaggcaatagtactttcttacagaggcaccccagtttattaagataagaatagggaataaacaaggggaaaggaatggacaatttgtgaaagaaataaaaaaatctaggaatatgagtgtcttacatattctaacagtttagtaaagcaaagcacatgagaattaaagggcagaaaaagaacttactcatggctcctgcagttctggctaaaatacaaacaaaaaaggtgagtttgaagagagcatgactcaagggtgtttatctcagggagtttcagatcaagcatttactacatatttgatttacatggaaaggcagcaagaaggtaagtaggcattttccttttttccttaggagactgttaaaatcatactccctgcagttatttttcttattcttaattttcattatcttcctgctgtcaaatccttctaaaggttatagataattttccctggccccagaatctttttcacaatttcattaattaatctagtttttattataagaatttccactttgttaaatgaaaaaattaatcagtcacttagaggatcttgaaatcagtctcaaattcctcacactggtaaaagagagaacagtaaaattgcaagtttttctcctttcctccatctttatgtgctttctcaccaccttccccattcctctggtagcaggcacattatagaatatcaaaatcattacacatggtatgcatgtatcaaaatatcacatgtatcccataaatttgtacaattattaggtgtcagtaaaaaaaggactgagttgtatatatgggaaacttacaaggaggttcttcagttgtttgtaaacattttatactacctataataaaaattgaaaagtgtaacattacttagatttagactttcagaaggcatggagatagacaatcccattccctcctccccctcctcaggtgtggtacaaacagtcttgagattaaagagctgagtccgacttttgctattctctagctctgtgattttgggcaagtcactaaatgttttgaacattaatttcctcatctctaaaacagaagttgtgtcctctgtcttacctatattgtgaagttgcagtgaaaaatcaggagtaataacagaagggaaagatgaaaagttgtattagaaatgttatggaaagaaatattcagtaactataaatgaatgaaacacttcggcaaagtagtaagctactttatattttacttttttctgctttaatttttcctcttatttctgactgtcctttggaaagttctgagtcctgacagcagagtattataatgtgcacttaattctgtttttatttttgatttattaatttctgttattttaatctttaaaacaaccctatcttcttgtgtaccttagtaccttaattatgtcattttaatctctgttgcttctgtcttgagaaataaccaatcatattttaagatgttgaaaattttgcaattttttttcttaaaataattgaataatttgtttccttctttgtgtataattatttttcgcttatttgttactttgctgttttggggagggaaatagtagctttccccagaaatgacaggatctaccctcagcatttgggaagagatgtctgtttttctatgtggtattttaggccgtcaatcactgaactgtcagtttcttgagaaggtgaagccactcctaccaccaaataaagataattttaaaaggacagttttcatatacttaattttttaagatttaagatattaacctatgttaggagtgacaagtatacttgagttatgcatatttaattttgatcaattattaatgactatctggagatgacaagaattttaggatacatgtgagctgagcaggaaagagaatcatgatcaattactgatttctgccacaggcaaaggcatgagcagaaatgtaacacaggtcatatatattccattcctgacctaaagtaatatggaataatgaggagaaaggaatttttctttctttttttttttgagacaatctctctctgtcacccagactggagtgcagtggcacagtctcggctcactgcaaccttcacctcctgggttgaagtcattcttgtgcctcagcctcctgagtagctgggattacaggcatgtgccaccacgcccagctaatttttgtatttttagtagagatggggtttcgccatgttggccaggctggtctcaaactcctggccttgagtgatcccctcacctcggcctcccaaagtgctgggattacaggtgtgagcctccatactgggccaagaaaggaaattcttgaactgagtattttgtggcgtttcccagctgaagacaaataagcagggcagtggaaggtatttacttgttgccttacagagtaaagaagaagataaaaaaaacttacgatgtacatatcctgccaaaatactgaatattgtgtgttttggattaaggacattgtctctgtggatattcttcctaatgggagcatcagagttagttcttttagagagtaccacattttccataccagacagaattcctgattatctctgtggggatcgatcacaaactcagttgcattaaggggcccagcaggtctcatgattgtgaatctgctagttataagggatagagatggtgaaaagtccatgccctacccagaggcattcaaattcaaaatttaaaataataccatcctgaccaaacaaaacacatctataggtggcaccgggctagtggtggctaatttgggagctctgttttcagatgagaagagatttaagtgagcaccatctatacttcaacaacagtgcactttgaaatcagtatcatatggttgtggcctgagttgggatagggcaagtgaatcccttccttttcgttactttaaggataggtattggttggatcacatttaattaaaacctgtgagtaataaacttgttcagattgtgaagcatctggaagttttgataccttttagaaaaaataatgaaatatgatatatttaattccatctttgaacaagaaacaactttgctagtaggaaatgtgaccctaatatgcaaccacaaatgtaatagtcagtatgaaaacttttgtaggaaaagcacatagatcagaaaaaaaaccctgtccagtcaggattatctgttttggattttttgccgatttcctcacttccctcctcctcattcctgtcacagtcttcccttcatttagaaaatgtgttctttttttttttttttgacaatcaattgaaatcagttccagaaggtttatttaaactttacctctttggttttcctcccttctctattcattttttccagcttccctcacttctctgttctttttttttttttgagatggagtctcactctgtcacccaggttggatggcagtgttgcgatcctggctcactgcaacctcctctcccaggttcaagcaattctcctgcctcagcctcccgagtagctggaattacaggagcataccaccacgcccagctaattttgtattttgggtagagacggggtttcagcaggctggtctcgaactcctgacctcaggtgatccacctgcctcagcctcctaaaatgtcatgattacgggcgtgagccatggtgcccagcctcttctctgttcttttatttgattaattttcaactggttgttgaaattagttatgtaacggacttgaaattttaatgagagattaaataacttgcctatgttcaaataaatagtaagtagggagctgggatacaactccagttagcctggctctagagtctgcatgcttaactgctaggcaatagtcctctgtaaattgaaaataattaacaagcaaatttattttaaaagtgattttttagtaggtcttattatattattctcaattcatggagaaatagtgtatagttcagatacgaagtgagcaataactttttcctaagcctacagtcagagtgtacagcataatttcctcccttgaaggtaggctgtgattagagagggacatagtcaagggaggatctgtttaagatggaagaaaatcaaacctgttctataccttaaggagaagcagttaaaggaaggaaaatatttaaagatgtagaagagagaagaaatgacttctgaagaaataagggggtgagaggatgtggtcaaaggcaagaataaaataatttgcttaagcaaggtgggaggtctccttgtcttagagagggggaaatgtgagaaaggtgggcatgatccagttaagacggctaatgaaggacaaggtggagaattatgagtcttaagccctttcaccctgacatagcaggaaacaggaaatagttaagacagggagaagtcctctgcctagcataggagcccaacaacaccagagtttgaaacaagaagataaacttactcatggatccttgaggtaaagctaaagaacaataacaattattcaagtcagtctaaagtttcaataatccatcaatttcccaaaagtcttcccagaaatagtgtcctccctcaggttattagactttccattcccctgtaggtaggctcataaagtggccacacttgcaagtgatcccatgtcttttcccccttagacactatgcaggagtgaaagtttcaggggaatattcagctttactatatttccaatattctgatttcattcaccacctttctcctgtcttttccgtttctccctccctctttctttcatcttttcagtttggagagtcttctttccctaatgtgatagcctcaagaaccaaagaaaggcaatgttacaaaggttctagttttataagaaaagaaaaccgagattgagaaagggaagggctgtgcctgaatatgcaaaaaattaaaggcagttttagcttccagtttgcttgactttaagttcagcacgttttccttcatattctttacaattttctcttctttctgaatattccttaaacatttttttctttaacgtactgaccatcttccctctccaacattttgtttctgttctttttgttcagctctaaaatgtttctcttgtaaaataacctaaattctagggcaagacttgtagaaggtttaatgatattaactttgatagtaatttgtacaagctaccatagaatgaaccctcactatattcagtggagaaagtctgggcattagtcttatttgtcttacattgactgttaaatgactatgcaaagtttgataattctcaccatcttttggaactgcatttatttaatttaatttatttatttattttattttattattattgtactttaagttttagggtacatgtgcacaatgtgcaggttagttacatatgtatacatgtgccatgctggtgtgctgcatccattaactcgtcatttagcattaggtatatttcctaatgctatccctcccccctccccccaccccccaccccacaacagtcgatcaatgacagggtttaataatttttcttctgctcaacttttatgattcaatgaggctaaattcacaaactaaagccctgtgttcttgggccttttagccttagggtaagttttggtaggagaagcaaaaaggctgactttctagaaatagggcctgcctagaaagaggtaaataaggaggacaaggtccctagacaaacaagcgtttatggtactgaaacaaccaagaacttgctcaattcccttgtaaattgtgctagatacccacatctctaagtgcatgtcaattgcttaaaagcatcagcgttaatccccctttgaaaagaagatcagaaaaaaaatccctcacactaccctcaccagggagcatcaaatcctctatgccagctgtagtgtgattttttcatggattgtttaggcatcttatattttggtggtgtggccgaggcccagaatgacatgtaggactgatgatgagcagagaaggtgattcccttttccttttcttctcagcctttgtaaagactgaaactgttaagggaacttggaagaccttaggttttttttggggggctggggtcggggggacagggtttcactctgttgcccaggttgaagttcagtggttgcatagctcactataacctctcactactgggctcaagtgatcctcccaactcagcctcccatgtagctaggactacaggcatgccaccatgccctactaattcttttaattgttctgtagagacagagcctcactatgttgtccaggctggtcttgagttcctggcctccaggatcctcctacttcggcctcccaaagtgctgggattacaggtgtaagccaccatgcttggcccttagtctttttttttttttttctttttcctctacttgcttttaggaggtggaggaccttagtcttgattaaactttccttagtttccctatgtgctcccttcttattatctgtttgctctcatttctctttcctaaattgagaaatagaaaataaactgaaatatggttcctggaattggcactgaggaataataataaaaatccacatcagtctgagttaattggtttataaagtatataattctcaccgaaatcattttagaaaggggacccttgattaggtctcattaagtacaatgggccatcaactactagaatgcttgggtttgaattctggttcctctacttactagctgtgttactctgcctgttttttttttttttatgcctaagtttattcattttaaaaataggatttataatatctactttctaggattattatgaagaaaaaatgtttaggacagagcctggagcataatgctcaacacatattattatatcatcatttcagattgcagtccttatctgtttatacatgtatgggtaatggaccatagtctcctctatcttgggcactacgctagttcaagattttcacggaaataataggatcaagccctttgaggtcctggtttgagaggccctttctcgagttatcacagtccagtgaattgcctatgagaattatctctcaagagggcctcatccattctgtaggaccacacatcatcttgagcttcagggatgaatagcttcctgtggccctatgcatctttcagctaaatactctacataactaattactcatcatcctttgagattaatcccaaaatgtgtcatatcctcatttaatttactcaccatccaaagacaattcctcatcttaaggatgcttattatcataatgctttttataattcctaatcgggacgttccttccacctctccttactccctaaaacacaccatgctgtctgaaattcatatcagcaaattttcctgtatctttaacttctccaaacgttttcttcaccgtcttgctttaatattcctgtatctcaagcctgggtgcggtgtctcatgcctgtaaccccagcaatttgggaagccggggagggcaaatcacttgaggccaggagttcaagaccagcctgggcaagatggcaaaaccctgtctctactaaaaatacaaaaattagctgggtattgtggcacacgcctgtaatcccagctgcttgggtggctgaggcacaagaatcgcttgaacccgggaggtggagttgcagcgagccgaggttgcaccctgcactccagcctgggtaatggagtgagattctatctcaattttttaaaaaaatactgtatctcagatgttgctcaaagcatacaaaattgcagttagatgggaggaatactttcaggagatctattgtataacatggtgatcgtagttaataatgtgttatacttgacatttgctaagagagtagattttaagtgttcttaccacaaaaagtatgtgaggaaatggatatgttaacagcttgatttagtcattctacaatgtatacatatatcaacacattatgttgtataccataaatatgtacaattttgtcaattaaaaattataacatttttaaaaaaccatgtctcttacagccctcttagattttttttttttgagacagggtctcactctgtcacccaggctggagtgcagtggcgtaatcacaattcactgtagccttgacctcttgggctcaagtgatcctcccacctcagccttccaagtagctgggaccacaggtgcacaccaccatgccggctaattttttattcattgtagagacagggtctcactctgttgttgaggctgtgatgtctggttttttgtatgtttgttttagaaaaaatccatacccatatacatgcctgaatgtaggtaaatgtcatttttgctccccattgctgtttccgaacagtcttctccagtagaaactcctgttgtctttgaagcacatatgagactttactctgtacctctctccttcttgccatcataaataaatatgatggtcattctctcccatttcattctctaccagaagccagggttgcctttttaaagcataaatgtggctttatcccttccctgatgaaaacaatggcttattgtggtgctcagaattgttctccatattttattctaaaagactttttgtgatctggcctcgccctacctttcaaactcctccacgatctttcacaactggccttcctgcaatctctcatacatgctactcttcttcccctctcaggaacttggtgttctttctgcctgagatactcttccctaagatcctcctgtggctgccaccttttcgccattcagagtcagttcagatatctcctcagggaaatttcttctaatctcctagctaaaggccctcacttcttggtcttgctctatcatattatcttaatttgttttctccgtagaatttactatgatagtctagtaatcatagtaggaattatctagaaagggaaatcattgtatttgtttgcttatgtgtttattttctgtcttacctcactagaatctatgctgtctgtgaaatacttatgttgtcttaggtatagcagctgcagtgctctaaatgatttcccctttggagggtttttatggcaagcctgtctcacatgggtcctctgcagattttgctgaagaaactgaagatttgagtttattgtttagcatgtttcaactcccaaatattttaccctttccataagttagatgaaaacaaagtaaaactagataaaacatgttttaattataaaagtaataaaatattgagcttgatagctttctaagggcacctgttcacagttgtatatacaacaaaacagccttattcatgggataaggttatggcacagtattggattagcacactaattctgatattttatattaatttacattttaagattttcaaattacattttaaaaattgaagtaatatattttcaacatatgcatgattttctaaattccttggaacaaacattttatttccaaagaatactttggattggaagagtaaatacatttaatgatgtcctgggggtagctggacaacctcaggacttggagtccaaaggccagtgtttagaacctcagttttactcttttgctagctatatgccttgggtcaagttaaataatatctttaaatttcattttttcctcatgtgtaatatctgtaaatagtcaagaaagatgacttgctttaattacaaacctctccttgtcccctacttccattccctggtctcttcacaagcctctctcttcttccctcctattcctaagttaatgaatttattactgttttgctgaaactatgattgccagctaaaaccattttaatcctctctttattctttaatcggtggacttctcattcttcgaagttctcattaattttagacaaaatgctcaatgatggggaaggaaaagcaggtgagggacaaaatctcagcagggttagggaatgttccttagttctgtgacacactaaagagacttagaatttggaaatatgaaatttccctccttgctctcctaaaagtaaatataaacaaaaaattcatgtggttgtctggctcaaaaactatccatttctttcttttttttttttttttgcaggggacagggcaggaatgagtatcagaaccaggaacgcctgggagcaccaaacccttagtgtcagttgcagctcagggggatagggaattagccatctcttccattgctgccagcctgacttggggatgcctcagggaaggctgccctttcgtgctagccatgtaaagctttaaaattctgaggacacagctaatatcatttatccctcattctatattatcttcatcctcatttttcttactaactttttgctcttatcctttatttactctgtttttccaacacttcaggtttggaaattgctctcttcatgtcatcataataaaccactagaaacttgcatttacttttgactgattattgaagtgtctggttatggagaacaaagaaattggagaaatgtgaagcttaagcttctgctgtgctgcagcgaagaagtctgggaagtttaggaagatatcctcttgactaaatggggctaaatgtcagcagaattgaagaaaagtaaaggaacttaccaatacttgatcgagacagtgctaaaataaaacacatcaaaagaagaatgagttctgtttgtcccagggagaacttagatgccatagacactatattgcagaaaggttgtggaaaagaagatagaaatgagtcacaacttatttcctggtatcaattgcaatgcaatgtggtgagcagctggatatctacatatggattccaatacttttgtggtaaggtgggactacaagatctatgcaacctgtctttcaattttggtaagagaataaaaatatttttggagattgctagtttctcaatctgaggacatttttctgtccctataagtcttctttcattggcgattctgctgctctgttctttccttctctacctttcctccacctcttcctctctctccttaattttctttctgttttccctttgttcgaaaagattttttgttacaccaaacagttaccacctaactgcttcaacaggggtttccactttccaaaattcacttgtgccctatggagatgaagaatagcaagagaccaaatcaggaagttcttgaataatattagaagctaaagagtcaaagtagtgaaagtatttagaacctcggggcttactgaaagggtgcttgctattgaggggaatatttcatcctctcctttaagtgattactttgaacatggtattttttaaagtttataaagtagagctgagcttgaaaactaaaaagagaagtaatatattcaagaaaaatatatcaagaaggaacccatattcttggtaatgaatgagaagttttaccacccatgtgataccttattgggggactgaggcttaaacacctgatcaccagcagaaatcaaggccataggcctcatgcattgtaagaacctgggattatcttcctgtttaatatgttaggttacatggaaaaagggaattaatattgcagatgaagttaaagttgctaatcagctgaccttaaaataggatgatgattttggtatatctgagtgggcctaatataatcacaaagatttttaagagtgggagagggagataaaagagagtaagagaaagaggtactacagtggaagaagggcagaatggtgtgatgtgaggacttgattcatttttgttcactttgaagatagaagaagggagccatgaaccaaggaatgtggccagcctctagaagctgaaaaagcaaggaaacagatttgttcctagaacctccagaaagaatgcagtcttgctgacaacctgattgttgtccagggagacatatatgacagatttataacctatggaactgatagataataaatttgtgttgttttaagccattaagtttgtggtaatttgttagagcagctatagaaaactaatacaacgtggttgactatttccccaaaattcccttgtagttaggtgtggctatatgcttgagttctagccaatctaatgttgttagaagtgatatgaaagtcatccaggcttgtttgtaaagtcatccactcatgatcttcaagcttttttctttctgttcacttaaggtggactaacatgatgaacttaggagccattatttgaagatggtggagtcattagttaagatgaatttgagtgcctaagacactgctgagagaagggccatccgccaatctggaattcctgttttggacttctcataagtaagaaataaaattctattagggaaaaccactgagattttaagatccggggctaacttaatcagtgcagataagaaatataaaagagaagtcacaagatctgaaagatggaaggaaaatctttacatacatagtaattttagaagtagagactacagtttgttgttagatatagatataaatatgggcaaaattcatagcaattaaagttaaatttttctgtaattagaaagattgagtccacagaatggaaactcttgaatgtttatgagtgtgagattaacttcatttatcctgctcagagtaaatggaagcattcaggattttccattgtgggtgtgagattcacttcatttatcctgctcaggataacctcacactcataaaaagttaatctcacacctataaacattataattaaatgcagagcacaaaaataaagagaatcttgaaaatatatttacttaggaacaaacatcaaactagtgatagattcttatcaacaataataaataataaacaacaagcaaatggaataaatcttcaaagtacagagggaaaataatgttcaattctatacctagctaaattttcatttaaggctgaaggtgaagtaaagctattttcagccatatgaaggcttagaaaatttttcacatacatgtagagtttaaagaaccagtaaaggattgtatttgggcaagaaatagaagagaaaagacacaggatgtagcaaataatgttaagcaaaaacaatgctgaaatattgttgtaagtctaagtaataattaattgtgaaaataaataattattttgtctttaaaaagaataccacaaacaagatggagaatttggaaagagtagtttggagggaagatggtcaaataaaagttattatctagtcttggaagaagataccgattatctttaatttttaaagaaaaattaaatagtacacatgttacaaatatcaggatacataaaacaaaatccagaaaaacactaagtaaaacaaaagaaacaaggaattctaatataccagcagaaggtagaaaagaagatttaaaaatgaaagaacagagcatagtactgtaagttgaaaacacaatataaattggaaacatttagataaacatataacaattcacaatataaaatgaactaaattcatctattaggaaacagaaaattttacattgttaatatgaacaaagtcaagcaatatgccatttaaaaaagacacaagacaaaaacaaacttttaaggttcaaaataaaaggatgaaaaataggcaaatactaattaaaacaaaggtgttagaacaatgctaatatcagagtgtagaattgaagtaaaaaaatagtcatgaggatatgagtggatatgaggatatgagtttcagcagcatttagaagttacttagatacttatattagaaaataagagcgcccactttggcagcatatatactaaaattggaatgatacagagaagattagcgtggcccgtgtgtaaggatggcatgaaaattcatggtgtcccatataaaaataaaataaaaaaagaagatgagaaagtctggaaattgattaagagtttcatacagcaagctagaaaaaggaacaaaaataaagcaaaagtaaagagaaggaattttacccatagatatacatagcccaagctatgacaagaaaatggttttaagaattggaaaaggaaactcaagattatcagattttgcagatgacatgattttttacatatagaattcaaaagaatctgaaaattattagaactctaagagcacagcagggtggctagatacaaaatctactctcaaatatacaacatataacttatattccaacaataattatttgtaaaatccatgtagagagatagtattaacatccgaaacaaaaaacaagtatgtgtataagaattaatgcagcaaaagacatgcaagacctttctgaagaaaattatattacattattgaagggtatatgagaaaatttgaatagtaggcaaccatgttaatgcatgggaataattgattttacaaattaatctacaggctcaatgaaatttcaatgaaatcctaatatgactcatagattttgagaaattatgaaattcttgtgtaagagaaaaggtcaaagaatagccaacacatttctgaaaaagaacaaagataatgtgctattttttgtaatgttataaagttttagtagtgaaagcaatggagtattggttcagtaaaagacaaaagatcactggaacagaaaataaaatccacggaaaaacgaaatatataagatgaagatggcattacaaatcagcagagaaagaatgcaccagtcaataaatctagttggaacaagatgagacgaaatccctctagttggttttccagatgaaaggaaaattagatctcacctgtattattactaaaatcactcaccaaaaccaaaaaacaattaacaaagccccatttggattaaagttctatatgtagaaagggaaatttcaaaactattaagagaaagtattagataaaatctttgtgatacccagataaggccaaagaaactaaaaagcagaaactctaaaagaaaacaagagattgacaaattttattacaataaattgtgtggtgctgggggagagtgagtagaggccttctaaaagtcaagagacagcataaaaatttaaagctaagagacagaattggatgagataattgcagatatttaacataacatataaaagttgatctttcataataataaagaattactacagatcaataactaatagataaatgggtaaagtaaatgaacaagcaatttatatagggtgaagcctcactagctagtaagcctatgagaagatactcaatttcaggagtgagcagggaatgcagattttaaaaattgtatacgtattcaagtggcaataatagaaaaatatgacaaaatctgggattgttactaatgcagagaaattggaaatatttatttatttttgtatgcctctatgtaactaccaaggagcttaattaatagctactaaaatttaaaatatgcataaattacataaatgctcatatacaatgtgaacactaatcctacttcagggtatgtaccccggataaactcttttccatctacttaaggattgtctttgcagcattatttgtgatagcagaaattggaaacattgagaatgcatcggtagtagaaataatagaaaaatattgtatattcataaggtggaatattattcaacaaagtgtataacctggatttcaaaactacattttgagagaaaaatgcaaatcgtaatgatactatcagacagatgccattttagtaaaattaaacattaaaaaaagatactatattttgttcagtgataggtagagactataaatatatgtaaatagacttaaatatttaaaatatattaataagcctttgggaagaagggagtggaatatgtctatgataacttgagaaatatgacaagaatattatcaatttgtcacatctaaggtgtgatatacaagtgttaattatttttatacttaattttaaaaactttcttaaaagagaaaaaatacagaaaaaatagggcttgcaaaccagatgacagtagaattgaaagaaaaccacaaagcacttacctagagagttggttgatggtgctaaaatacacacacagaaaacatgaggtgaatcatgagagtttggatccctaatctttacatatcagcttcagttgctgtcacccccttctcaggagttaaagtctaggccccgggagtcatcactgatctggtgatgggtactgacagccactcccaccagctactgcatatgctttccatctctaaaaatgggtttaatttttagtaggcagatgccattcctactgccctaattcctccctcccttttttccctctctattttcttctctctctcccttttatctttattactttccttttctcttgctcatcacttctattgttttccttttctcccagccagatcattctaaaccagcactagaaaactttatctattgcttagtattcatatgacttgacatatgacaggatttctctttcctccaaagcatttacaatctagggaaatgttactaataggaagcaaatttttgttaagaagcaagataatacttactgtaatctcttttggatctctctgaaaacataaacaaaagaaagaaaaatcaatttggatattctatttctgtagttttggtatcactacagaggattacccagtcaacaccctcaaatatccagttaggcaagaaactggagacaaaatctcctcatggcttaatttataagtttaatgacattaaaaaaacaggcagagtttaattaaggtaaatacatgtagtgagaagaaataataaactatacatgcaaacattgaaacagaagaatgtatagttataaggtaagttgaggtcaaataaaagaaggaatggcaaaatatttactcagctgactgagaattcaagttcagtgacaatatggcaaattataatgaatgcaaatgtgtatattgattgcgattgaatgtgcatcctatgatctaaaacttgtttcttagtgatgtcatggaaacagactttctaaaagatctggagacaaagcaaattacatggaaaactagtcatgttatcactgttgttttcataaaagtgtaaaagtaaatagtaatattgatactttgtagttgatttaaattatgttgaatcataatatcatttgctatttcactaaagtatagttaaagatctactcagaaatgtgaagacaatagtatttttttttcagcttcttttctgaaaatgagtgctctccttccatacttggcagtcattgtgatgggaattaagtacaaaacacattctctgttttataataatgtttcttgtttctcatggttctatggggattttaaaaacggtgtctcaagcctgtagtcccagcactttgggaggccgaagtgggtgtgttacctgaggtcaggagttcgagaccagcctggccaacatggtgaaaccctgtctctagtgaaaatacaaaaattctctgggcctggtggtacacgcctgtaatcccagctactcaggaggctgaggcaggagaattgcctgtgcccgggagacggagattgcagtaagccgagatagtgccactgcactccagcctggcccacagagcaagactctgtctcaatgaaaaaaaaaagggaaaatacatcaagatgttaatagagttgccacaaaaatggaaaataccactgaaatgccgaacattttaatatgctgcacttgaaatttgttataaaaactttcatgcgctgcacttaacatttgctagaaaaatactaagaataaatttaatttcaaaaaaattttggaataaccatggcagcttttatatgtgatatatttaagttaaactaaactttgagtactaaatttcatgtacctaaactaacataatgaccttacctaatattaatatcttcctgccagaagatttctatagtctcaagttgaccagtacatttatattcctatgtctagaaataatggagggaagactagcagggcgtgggaacctagaaacttaggatgactgagatttataggttatgttagggggactggaaagtcagagaaatagtcatttgggtttatgaattttaaagtatgacttattgaaacaacaataaaatgtttactgattcaagtttttccttaagaatgcaagggagcccagattagaaagatactaagattgtaggcttgtacactaaagatctgtaaacaggaaattaaaaattaagatattactaaattacataagaataaactctctgactgcctaaaatttggaattagacaattctaaattcctatccaggttgtcacttccaagtcctgtggccttgggcaagtcattaatgttttttaagcataagtttctcttctgtaaattagggataacaatagtaaattactttcttcatttaagaggtacttattaaggatctccctcgctgtggtgaggtgaatagactataagaaggcaagaggagtatcaaggaaacaaggtaggaggcaagagatattggtgtttgggcaaggattgtcatggtggtggaaggtggtttgatttggagtataatttgaaagcatcagagatgggatttgatggtggattggatgaagagagtaggaaaggagttaaatatcattccaaggtagatagtctgagcaattaggtgaatacaagtgctagcaccagtgtgtagaagggattagggcttgggttttagacatgctaagagtgagatgcctttcatatatcttcaggacacgtgtgctatgattatataggttggctcactgcacaaagggttaagggaactgaaatccacaacagtgtctctggggtggggctgcattcacttgcaggaaggaacaccttttcctaatatgcaccaaagcaacctgtaggctactggaggccttggacagccagggagggatttttgggtagctcatctttgtgtggttgacagggttgtttgtagatattcaatattaataaaatgaaaaaatgctcaccagaatgactaacatatagtaggtgctgagtacatgttaattctcctcccttcttatagtgtgtagttttattttgcttatccgtgtacccttaaattcctaacactgaggtagcttcttgcactggttaaatctggtattctggtagactgttactggagaggttttttcccaagaaatatgagatgtaaatgacaacagtagacaacagcagtatttctttgcacccttggaattttattgcacaagtcatatcttaatgtgatgaacttttaagaatttattccttgatttctttttattattattatactttaagttctagggtatatgtgcacaacatgcaggtttgttacatatgtatacatgtgccatgttggtatgctgcacccattaactcgtcatttacattaggtatatctcctaatgctatccctccccactcccctcaccccacaacaggccccggtgtgtgatgttccccttcctgtgtccaagtgttctcattgttcaattcccacctgtgagtgagaacatgaggtgtttgattttttgtccttgcgatagtttgccgagaatgatggtttccagcttcatccatccatgttcctacaaaggacacgaactcatccttttttattgctgcatagtattccatggtgtatatgtgccacattttcttaatccggtgtatcattgatggacttttgggttggttccaagtcttggctgttgtgaatagtgccgcaataaacatatgtgtgcatgtgtctttatagcagcatgatttgttttattattattattattattatactttaagttttagggtacatgtgcacaatgtgcaggttagttacatatgtatacatgtgccatgctggtgcgctgcacccactaactcgtcatctagcattaggtatatctcccaatgctatccctcccccctccccccaccccacagcagtccccagagtgtgatgttccccttcctgtgtccatgtgttctcattgttcaattctcctttgggtatatacccagtaatgggatggctgggtcaaatagtatttctagttctagatccctgaggaatagccacactgacttccacaatggttgaactagtttacagccccaccaacagtgtaaaagtgttcctgtttctccacatcctctctagcacctgttgtttcctgactttttaatgatcgccattctaactggtgtgagatggtatctcattgtggttttgatttgcatttctctgatggccagtgatgatgagcattttttcatgtgtcttttggctgcataaatgtcttctttttagaagtctctgttcatatccttcacccacttgttgatggggttgtttgtttttttcttgtgaatttgtttgagttctttgtagattctggatattagccctttgtcagatgagtagattgcaaaaattttctcccattctgtagtttgcctgttcactctgatggtagtttcttttgctgtgcagaagctctttagtttaattagatcccatttgtccattttggcttttgttgccattgcttttggtgttttagacatgaagtccttgcccatgcctatgtcctgaatggtattgcctaggttttcttctagggtttttatggtttcaggtctaacatttaagtctttaatccatcttgaattaattcaatgagtagttagcatttgtgagatctgggatgttgaatttctcttgactactcagattatttttttcttttctttagctttattgaggtataattataaaaattatatatatttaaggtattacagtgtgtgattctaatatatgtatacattgtgaaatgattgccacaatcaagctaattaatatatctaccacttcaaatacttacttctatttttcattttgtgatgagaatatgtaaaacctacactcttagtaaatttcaagtgtataatacattatagtcaccatgctgtacattgggtctacataacgtatttgtcataaaactgcaagtttgtaccctttggccaacttctgcccatttcttccaccccctaacttctggtaatcacctttctgctgagttcaactttttaaggttccatatatacatgagatcatgtagtatttgtctttctatgcgtggctaattatacttagcctaaggtcttccaggttcatccatgttgtcacaaatggcaagatttctttcttttcctaaggctgtataatatttcattgtgtgtgtgtgtgtgtatgtgtgtgtgtctgtgtatcacattttctttatccattcatccactgatggacacctagtttattcctctatcccgggtattgtaaataatgctgcaatgaatatgggagtgcaaacatctcttcaggataatgatttttatttcctttgaatatatgcccagaagtagcattcctgaatcatatggtagttctatttttaatttattggaggaaccacaatattgttttccataatggctgtattactttacattcctaacaacagtgtacaagggttcccttttctccatatccttgccaacacttgttatcccttgacattttgaatgcatcctatctggtgtgaggtgcatttccttgatgattagtgatattgtgcacctttatttattagttggctgtaagtcttctctgaaaaaatgtctatttaggtccttagtccattttattttattttattttgtttttttctctctctcttttttttttattatactttaagttctagggtacatgtgcacaatgtgcaggtttgttacatatatatacatgtgccatgttggtgtgctgcacccattaactcgtcatttacattaggtatttctcctaatgctatccctccctgcttcccccaccccgcaacaggccccagtgtgtgatgttccccaccctgtgtccaagtgttctcattgttcagttcccacctatgagtgaaaacatgcagtgtttggttttctgtccttgcaatagtttgctgagaatgatggtttccagcttcatccacgtccctacaaaggacatgaactcatcattttttattgctgcatagtattccatggtgtatatgtgccacatattcttaatctggtgtatcattgatggacttttgggttggttccaagtctttgctattgtgaatagtgccacaataaacacacgtgtgcatgtgtctttatagtagcatgatttataatcctttgggtatatacccaataatgagatggctgggtcaaatggtatttctagttctagatccttgaggaatcaccacactgtcttccacaatggttgaactagtttacactcccaccaacattgtaaaaacattcctatttctccatatcctctccagcacctgtttcctgactttttaatgattgccattctaactggtgtgagatggtatctcactgtggttttgatttgcatttctctgatggccagtgatgatgagcattttttcatatgtctgttggctgcgtaaatgtcttcttttaagaattgtctgttcatggactaaggttcatgaacagatatgaaccttagtccattttaaaatcagcttatttgtttcagctgtattttgagttgtatcttgcttttgagttgtatgagttccttatatattttggatattgctgtggttttaatgtcctctccgaaactcatgttgaaacttaatcttcaatgtgacagcattgagaagtgaggccttaaagaggtgattatatcatgagggttctacccacataaatggattaatccactaatggattaatgagttgtcaggcaagtggaactggtggcttcataagaagaggaacgggccgggcgcggtggctcaagcctgtaatcccagcactttgggaggccgaggtgggcggatcacgaggtcaggagatcaagaccatcctggctaacacggtgaaaccctgtctctactaaaaatacaaaaattagccgggcgtagtggcaggcgcctgtagtcccagcaactcgggaggctgaggcaggagaatggcgtgaacccgggaggcagagcctgcagtgagccgagatcgcgccactgcactccagcctgggcaacagagccagactccgtctcaaaaaaaaaaaaaaaaaaaaaaagaagaggaacgacctaagcacagcatgttagccaccttgccatgttatgccctgtaccacttcaggaatctgcagagagtccccactagcaagaaggctctcttgcgccacatgcgccccctcagccttggactttccatcctccataactgtaagaaataataatacatttcttttctttataaattacccagtttcagatattctgttataagcaacagaaacagattaagacaaatattaaccacttatcagatatatggtttgcaaatattttctcctattctgtgagttggctttcattttgttgattgtttcctttgttgtccagaaacaattttgtttgacgagataccacttatttttgcttttgttactgtgtttttggtgtcatataaaacaacttgcaaagaccaatgtcatggaacttttcactgttttattataggagttttatagtggcaagtcttacattaaagtcttcaatccattttgaattgatctttgtgtatggtatatgataagggccaatttctttttgtttttgcatatggatatccggttttcccaataacatttatcctttccctattgggtattcttggtaactttattttctcccttgttaattttctgtgtggatgctctattcattgtcaataatgggttactgaagtccgctacgattattatattgctgtttctcccttcagttatgtaaatattatatatttaggtgctctgacattatgtgcatatgtacttataatttttatatcctcttgatgaattagccctttataattatatagtgagctcctttgtctcttgttataatttttgactaaaagtctattttgcctgatgtaagtatagccacccctaccgtcttttgttttccatttgcatggagcatcttcttttcatccctttactttcattctatatgtatccttagagctggagtgtgtctgctacaggcagcatagatagttgcaacttgtttttaaatacatttagctactctgtgtcttttcattagaaaatttaatccatttacgttcaagtaattattgatagttaaggacttaatatagttattttcttggttgttttttggctgtttagtatatcctttcttcctttcttcctgtctttctttgtgatttgctgattttctgtagtggtatgctttaatatctttctgttttgtgtatctagtataggtttttggtttgtggttaccataagcttacataaaacatggtttcaacagtctatttgaagctaataataacttagattattaaaatagattacatacaaaaactctacatattattctccctactttttacattctcagtgtcaaaatttacatttaaaaaaattgtatattcattaacaaattatatacttttaatattttgtcttttaacttttatattagcattaaaagttatttatataccatcattacagtattagaatattctgaattgactgtatatttaccttaccagtgaattttatacttggatatgttttcattttactaattattggcctttcatttcagcttgaagaacattctctagcatttcttgtaaggcagatctattggtgataaactccctcagcttttgtttgtctgataaagactatctctttctcagatctgaaaaacagctttacgggtaaagagttattggttggcagtttttttctttcagcaaattgaatatatcatcccactatgtactggcctagaaaatgtctgcatagaagtgctaatatccttttgatgtacctttaaatgtgatatgcttctttcaagattctctctttaactttgattattgacaatttgacataatgtcttggagaagtcttctttgggttaaatacaattggagagttttgagtttcatatatcgagatgtctatatctcttcacagatttggaaagtttttagcaattatgccttaaataagcatttattctattttatttctcttttcctctgagactccaataatgcaaaaagttagctcccttgatggtgtcccataaatcttgtacatatttcttcatttcttttctttgtggttttttttttttttgtactctgactagataattttaaatgattggtctttgacttctcttattctttcttatacttgatccatcatcttggaagctctctatttcctttttgttttagtttaggcattacacccttcagctccaaaatttgtatggctctgttttgtttttttttctctttgttgaacttctacttttgttcttgtgttgttttcctgatgtcattatattgtttgtgttgtcttgtagctcactgagctttcttataacaattgttttggatttttttgtcaggcaactggtggattgatttttaggcaaaccttcatttttgggggttagttactgaaatattattgtgttcttttagtggtgtcatgtttccttgatttttatgaccttgaagtcttgtcttgtgttttcacatttgaagaaacagtcaccctgttcaatatttgtttgtgcctacttcacaggtgggattttttccctttttttgagagaaaatctcactctgctacccagagtggagcagtggcatgatcgtggctcactgcagcatcaaactcttgagctcaagcaatcctcccacctcagattcctgagtagctgggactgcaggtgtgcaccaccacatccaactgattttttttttttttttagagacggagtctcactatgttgcccaggccagtctcgaactcctagtctcaagaagtcctcctgcctcggcctcccaaagtgctgggatttcaggcatgaactaccacacccagggtagatgggatttctaagattgtgctttctctcaatcctgcaaagccagtccaggttctgagagccttccctttgttttccctagggtggtgctctggaattctcaagtttgtgtccttttttccgatcctacaaagtcaaactgactgtgagatgtttccttttgttgtccatggtggctcatttggggactcagcctagatgggagagtgaaatgtgtgaaaggcgtgcctgtgggtcagtagtgcaaggagcataggtcacgcatctcaaatggcaggctttctgatgaggctttctgatgagtgggttctgcagtctcttttccctgttcccagcctctcctaaccattcaactatgctgatcatctcaatgttctgggtggagtgagaaataagtgggcttatcggacagcatcctgaatggctgggggatgtgggcactcattaaattctgcacattttttctgtgggagaaattgtgggccaagtgggtctgtctcagcattgagctgtgccaccttgggggaggagtgatgtgggtaaagtgaaactgttcttcttaccctctttaatacatctgttctaggattttataacctgacagcgtgctggaacttctctgctggactcctggactcccacaatggtattgtctcatctgtggatagttgtctaaattgatgcttctgtgtgggaagaaagctcctattctactattttgctgatgcctttctctcatattacttttgttaaataattaggagttggataggagaggaattgcatagctttggggaaaatggtgcctcatagcgtgatggtgaacatttgtgaacatttctcagaatattctgtacctactttgatttcttcttcttcttttttaaattttggtcagtttttatagccttttatgttgtggcaggaagaagcctgattttcctttaattttacaaaaatctctacatatacttacctcggttatcatatgaagtgtctagagaattgaagaaaaattataagattcttaatttctcataaacagactcctatattaatttcttagcaatacaataatttaccactttgtgttgaatatgcatgtcgggatcctaaaagagaagataaaaacataatgagattttacttcaacaagtgagtctatattattttttgttagatagaaatctgtttacctcttcctcttttagatctctgagaagaaaaatcttttaggaaagaaaaaaacatattaactttaccaacagttcattaaaaaataagtttatcgggccgggcgtggtggctcacgcctatgttcccagcactttgggaggccgaggcgggtggatcacgaggtcaggagatcgagaccatcctggctaacacggtgaaaccccgtctctactaaaaacacacaaaaaaattggccgggcgtggtggcaggtgcctgtggtcactgctcagaaggctgagagaggagaatggcgtgaacccgggaggcggagcttgcagtgagccgagattgcgccactgcactccagcctgggcgacagtgcgagactccgtctcaaaaaaaaaaaaaaaaaaaaaaaaaaaagtttatcattagtctcaatccaactactaaaagatttgctagtttcccagatattcccattttctttaggttccatttcagaaaataaagagggaatgccatggcactgtgctcttcactcttgttgttcatgatagatgaatcatagaggtaagaaggagaaggatggaccaagagtccaagtgtggggcatggacagcaagcgaagtgactgagttactttctcttttctttcctcaactctcagggatctatatgcttgtagcgtgtgtgtgtgtgtgtgtgtgtgtaattatttccacatccacaatctcataaccttatagttctggtgtagctggtgggcctggtgtggacaactttagtggcttccagcaagaatgagaggtagctctagtggttcttgttgagttctggagataggactagtcagaaagagagaaagagggaaggaaagagagagagagagagagagagagagagagagagagagagagagagagagagacagccgagggaacatctataggcagccctggtgagtggatactgaaagagaacattgagtgttggggcgtgagggttagggatagccatggtacattgaaattagtggtactggtgtgtcccttcaaaaaagtagacagcgcattgccatcttctcataactctcacgtttcaaaacctgaatttgatatccagctccctcctcagctaggtgaacttgagtaagtctcaatcttttgagcataaatttcatcttcttaaatggggataagctttgtttacctcttctactatatggctttcaaagtgtattttcacatatactattccatttcatattcattttatccacattttaaacatccaggaaattgtttcggagcggttccttaacctttctaatatcttggaagtagacagaagatggaaatgaattcttttgatggtcttaagaaggagaattatttaccttttctgagaaaaatgcacaatttttcttgagaaagagagagaggagtgataagcatttgaatattataaaaacgaaagatatgctgactcaacaaatcatgctcaaatggagatgagttgattcacactctaaagagtatattccttcattaactgtctagtagttcctaatctatttacctctaccatcctcatagtccagaagtctagcacctagaaaaaaagggagagcacatgattttgcttcttgattattaatgaggctttatttaagactctgagaactaatgtaaacatgaactcctaatggtgaataatgatgtgaattaatttactttgcaggaactaggaattgtgcataagctacaagagctgacgatgataagtgactgtgtcaatcaccaattttataatattagccaggctaaatgatagtcagaaggagtttcagagtttcttttacctcttgatacttcagcagctagtctcctggtttttgcctcataccaatcctgtgctatctttcttaacaactttggcatctctccagacctttccatggaaagtcttcttcaattcttcacatcctgaagttggtactcttctcaatcataattaccctaactgtgttcactctcattattctaggatacattatatttttcggtccggccacttcactgaggccgtcttcatgaatggatttaggctttttactgaaccatctgttccagtgcctgaactggaacagttctctgttgctgctctcagaccacaggaagcatctgaagggagcctcagaattatgcaggcctacccagtattaattaattctccccaaatccagtttggcattcagtactgctcagaaatctctggtagatttctcccactcacttagaagcagttcagttcatgcaatggtgcactatgcaaggttctggaaacacaactgtaaacaagacagatttcattcctgacttgtgaaaattctataagtactatatttatttttctcatgagtataagtacttactttgttctgaactgtatctggagatatacatttctgtggaagaattaggcaaaatgtttttattagttacttaggagaagtgttcttcctctgatcaaactcttctcactctaagctatgcttcttgcttaccaaggtggtcctcctgatataatgcattgttgttctcacccattttccacatctcccatcagccctgttttacctgtcttttcacactacttatgctttgagggctcacaggcattgaggatgggaaacagggagggaatacagctgattagaaagttgtgggagagaaacagaaaaatccaggaaagagagaccttatggcatagaaataggtcttagcttttatgagctccatctctatttcatcgacaagtactactctgtatttgtctcttcttatcatctccccaaattaagtcactaaaagtctccaattctttttatataatactagatactggtgtttagcaacatactgtcttctcacttctatcaggtaatttcccttggagctcaggtaattttcttttaaaatattcttattacttttgctaaactctgtgattttttttttttttttttttttttttttgagatggagtcttgcactgtcacccaggctggagtgcaatggcgtgatctcggctcactgcaacctccgtctcctgggttcaaacaattctcctgcctcagtctcccgagcggctaggcttacagttacctgccaccatgcccagctaatttttgtatttttagaagagacagggtttcaccattttggtcaggctggtcttgaactcctgaccttgtgatccgcccgcctcggcctcccaaagtgctgggattacaggcgtgagccaccgctcccggcctatctgtgactttttctttgacattattgataatgtaaaccttgggagttaaaagtgcagggacaatcactaataggtcagagattctttgactcaagtattgaaacagattcccagaatattggcaaagtctctagctgtttgatgagtgagatgaactcagactgaatcttggcatccctccctccatggttttcacaggaaatcttcattttgactcattattactcaccactttgcttacgtcgtgcccatcttgttaacaaaatagccaggatggcaagtcccagtagagtcaggatgacagccaaagttatttctgaaaacaaaaactcacctgtaaacatgcttatttagaccaggaaattaccagaaacaacttctgatcacctcttactatccaccagatagacttttttttctttcccctttctgctacttcaactcctttattcttttatttgccgcatattactgtcctcacattcccgcccctgcccatttttagttctttggtcgtatactaagaacctcagatgctgtgtacccttggtttagagttggaaatctgacagatttcctcctcagttgaaccctttactccccaggcaggaagaatgttaaagggaatcagtggtctacgaagctatccactggggtatggggaaaatattagaacttctattttctgtgtaattttaactcatacctttaaagttgcaagattttctgtatatatatatatatatatatggctataaataagatttataaatatacttttataggcaatgcatactcaaaacatttttattagtgagtgatcaaaaaactttcagcaccttgactgaagggtgctgactgaaggtggttttattaatgaaagccacagcaaaggacagaaatttcttgtcacagaaaaacctttcagtcatcacttgccaacctcctgatgataagatggatatttgcgaggtttgttattgtggttagtaggataaaatatgctgggattgcttaacttgtgtttgtttatgtgtcattgatctgcattcaattgatgtaagatagagtcttgcagtcataggagagaaaaatcttagacaatatcatatggttataaagggcagtggctatgaaggatcgggggagaaaaaaaaagaaaagagagagagagagagagagaaaggaaagaagaaaaaaacaaccataaaactgcctgtgaaagtaaaagctctgaagaatattgagctctgaaagactaggaaagtagattacacccacattaagactacttcaaacgaacaataggtgaatccatctcaagatataataacacacctccaaccagggcagattaggcatttgtctactgagtcttctaggtgtttggtcctgtgagaaaattctcctgccaaatcaacttttggagattttcttctaatgtacctctaaaatgaacagcaagtagtcaatatgccctctattatgtgaatttttttttctagtgttaaataactcatcggggaggaaaggataactagatggtgtactcagtactactgtatattccttttcttcctttagtgtctgaaatgccctgtctatagggcggttagaagatggtccaccctattaatagggaaaatgagaggaaatcattatttctgagttgaggcagattatatagagtgaccatgctacaggaagtgagataatgggctaaggaatttttcctagtgctacggaggatggttattttctttgttcagtttaaactctagaaaccaaaggagaaaccagcactatcagcctagagcttagttaactgtgggttgtttcccccaggcttccagaggaatcaataagagtgaaagaaaaaatattgaatttgaaaaggaagcaggcaaggaagataaagcagttgtgttaaagtccctaagtccctaagaggagactcctgaactactagagttgaggaagcctcaaagagggagttagtccatacccaagactgtcattttccatgtattgtcttcatcaggtctcgcatcatctggatttctttgtcagagagagatcaagataaaacgaaaaactcaagttcactgtttctgagcaatatgaacttgggtgtcagggaggcccttgtaggcagagatgcagaggatcactgagaaattgcgtggagcagattgatcagacctaagcaaatgatgggagtgtggcctgtgaaggttctagaatctgtgtcataacagagacttagaacattagtgaggcaggagaaaaggcagaggatcaaaaggctaggaagatttaataatgctttggaggaccttgaacttgtataggatactggaagggaactcactctttctgggctttagaattatttctagtttttcagagatttttaaggccagagattgtatatcattaatctttgtaactcttttttttaattttttttgaagatagagtttcactcttgttgcccaggctggagagcagtggcaccatttcggctcactgcaacctccacttcctgggtttaagcaattctcctgcctcagcctcccaagtagctgggattacaggcatgtgtcaccacacccagctaattttgtatttttagtagagatggggtttctccatgtcggtcaggctggtgtcaaactccctacctcaggtgatccacccgccttggccttccagagtgctgggattacaggcgtgagccaccgtgcccagcctaatgtttgtaactcttgaggcagagaaccttccacagaataagcattttataaatgtttgataattaaaaatgagaaaaatgactatatttaaaaagaggcagactggataaagaaaatgtggtaaatatacaccgtggaatactacacaaccataaaaaataatgagatgatgtcctttgcagcaacatggatggaggtggagaccactattctaagcaaactaaagcaggaacagaaaaccaaataccatatgttctcacttataagtgggagctaaacaacaagaacacatggacactaagaggggaacaacagacactggggcctacttaagggtggaggctaggaggagggagacagcatatctcttgggttttatgcttattacccaggtgactaaagaatctgtacaccaaacccccacaacacacagtttacccatataacaaacaattacatacatgtacccttaaaactaaaagttaaaaaaagaagagccttgaaacaaatgaaggtgaacaaaggaagtcaagttgttggagttagatagcaagaagaaatccagtccagaggtctatggtgctaggaagagtgagccagtaaatgggatctcataagccactgtggagaacaaggaagagtaataacatgttttattgagtgtctattgactacaaagttctatagtgggtaccttataagcacaaacttgtttaatccctaataaactgtacgatgaaattctttgagatggagagagacactagaagttacccagccaacaaatggcagagtttctgactccaaagcccacactgtattcacaaagccacattttgtttcagtcttctatgcatcctgtggtggtgatttctaagttaagaagtcagtcacttgaagaggaaggtgatgacttctagttttaggatgctccacctgccaaaaataatctcaaaattgttgagattatttttccataagtgttttatgcatacttatggaacaccatcaaacatacaaatatatgaattatggaagtaccaaaagaagaaaaagaggaaggggcagtaagcttaatcaatggaatattatctgaaaattttccaaatcttgagagggatatgaacatccggattgaagacgatcaaagcatcccaagcaagttcaattcaaaaaagacatactccaagatatattataatcaaattgtcaaaggtcaaacacaaagagagaattctgaaagaaacatcatgtgtaagagatctcccataagtccattaccagacttctcaacggaaaccttgcaagtcagtatttttaacctgcagaattgctatttatttctataatttctccttctgatattctcaaattgctgagacatcattcttatactttattttttagacatgtcttattctgctaattacaatgtctgggcttcttcagaaacagtttctttttattattttctgtgcatgggtcatgatttcttttctctttacatgcttcattattttttgctgaaatctagacattttgaatattataatgttgcaatttagaaaccagatttcctccctctacagagtttgctgttgttgcatttgttgtattactacttgtttgtttgtttgtttaaagatttttctgatctaattttataaagtctccattctttcctgaatgtaacgtttgatgtttctgcccggttagcttagtcattagctaatgattgaacagagacaatgcctagaaccaaagcaaacactatgctagtctgtgccaaggaactctgtgtgtgtgtgtgtgtgtgtgtgtgtgttgaggtacaccttcaacattcaaccagtctcacttttgcccctccaacaaatgcccagtgaatttgcgcccagtaaggtccaggtcaccttcttcctacaggatttaaagcaaaccaagggggatcttggcaagctttcagatgacccttatagatatatagaggttttccagactttcacccatatatttaaactctcctggagagatgttatgctacttttgaatcagaccctgatggacactgagaagcaggccgctctgcaagcagtaaagagatttgggaatgagctttgtatcacatatggcatcagggaagggagcaaacattatccaactggaagagaagcagtaaaagtgaatgaccctaagtgggatcccaatgacaggtggaagactggaagaggagacgctttcagatgtgcataatggaaggcttttgtaggactaagaccaagcctctcaattatactaaattgtccatgatcgacgaggtatttgatgaaaatcctgctgccttcctggagagactaagagaggccttggtaaagcatacctgtctatctcctgattcagtagagggacagctaaccctaaaggataaatttattactcaggcagctcctgacctcaggaggaagttgcagaaacgggccctgggaccggatagtacattagaggaccttctgaaagtggccaccttggtcttttataatacagacagggaggcccaggaaagagagaggaaatacaggaaagagacagaagctttaatggccaccaggcaagcccacaaaccccagaattcccagggtacacctgttaactactaaagatatggccagaacagttatctcattctaaaagtttatccactcccatacaaggtttaatttctttcaccagggtgaaacatctcagggtacaatgttgttgttagtatatttcacttcttatctctgtaatctttggcactaattttttttccttgtataatacacgtatttattatagtatgtatagtatgtatgtatgtagttacagtgtgtataacttgggtatacatacccaagtatatataatccatgcatacttaaccttataaaacttgttttttctctcacacctggaagccatcaacctccaaatggtcagggaaccggagccttggatggtggctcccctttgctaggaacccttatatagacctctgggaagaatctgactgccgttttccccaaaacgatgcccctatcagcaggaagcagctaagacccatcatcatccatattcgaacagcagttagacgtacctcttcagacaggggaggtgatatagaagaggggcagggaagtgctggtaagggaagggcatggtccctggctaaggctccacccctgggcctgtgcccacagacctaggtaaggacagacactcctgccttcatgcccaaatgttgcatttcccaagaccaccctggcctgccatgcccccatcctgtgcctgtaaaaatcctgagaccctagcaggcagggacagaagcggctggacgtcaaaaggaacacatcagtggaagaacacacaagtggctggatgtcaagagggacacatcggttaaagatcatgccaacaggaaccagcagatgctggcacgctggcaggccattgaccagcggaacaaaatggagtttggccagggcagttggaggggaacccagctgctgagcagcctgactccaggggaaaaccaccttcccactccatctcccttctggctcccccatctgctgagagccacttccactcaataagaccttgctctcattcttcaagcccacatgtgatctgatttttctggtacaccaaggtaagaacctgggatacagaaagccctctgtccttgcaataaggcagagggtctaattgagctagttaacactagctgcctatacatggcaaaactaaaagagcacacagtaacacatgcccactggggcttcaggaactgtaaacatacacccctagatgctgccgtgaggccagagccccacatcctgtccgtctgtatgctctccctagaggtttgagcagcagggcactgaagaagtgagccactcccgctgttgcaagccctgtgagggggacaagaagacctttcccatttcagtatcttagaaggtggtaactgctgtgaaaagtgaaaaagcaagtcagtgaaagagaactactggcagctgcagtgggatttcgatttaaatagattatcctggatatacctctgtgagaaggcaatacttgggggaagtagggtagacatctaagtggatttctgagtgaagagttttccaggcagagaagacaactacagcaaagaccgtaagataggaatgtgtctggtgttttcaaggaatatgaagtggccagtgtcactggtatgaactgatccaggaaaacaacagtaggaaaataagttagaaagataatggatcagccaggcatggtggctcatgcctgtaatcccagcactttgggaggccaaggtgggaagaccccttgaacctaggaattcaagaccagctggggaaagatggcaagaccccgtctctacaaaataataaaaaaattagccaggcatggtggcatgcacctgtagtccagttactcagaagactgaggcaggggaagaccctttgatcccaggaggttgaggctgcagtgagctatgattgttccactgtactccagcctgggcaacagagcaagaccccgcctcaaaaaaaattgtaacatctagtgagctactgacaggactttgattttaacttgaatgaaataaagagataagatgggtcattatgtaggcaaatgacacgtttttacctatgtctgcataaagacataaaacaattttgctgctgtgttaagaaaagacagtagtgggaggaaaagaagaagcaaggagactactgttaagagttatccaggcaatcattgacagtacctttgtctagtttgtgaactactaaagtggtgaaatgcatttaaatttgtagcagtattttccccactggggataagggaatgactgccaaagattgccaatacctaggcattaaggagaacataaatataagtatggaatttcatgcagaccagggttaaagggtctaaggatacacctgagacaatgtctgaaaactaaggaagggaagaaaagtgaacagaaatagagttaagtgggagtagttgtcagaaaagaaagtaatgtctaattatacagctgtttattgattaacagagggcttctaaagggcagttatttagataagaacttcttagatgagagtgcaacttcgctgagcgtagtagattctaatcttaggccctttgccatagacattttctttccctgatgatttttttaaatccatattttatatctgcaaacacatttttctttccctcaggttccagaatctgtgtctcaagcctacgtggcttagatgggatctaacaagaaaagtctgtcccctctctgggttactgggtccaaccagttggcaagttttagctctgattttgtttcttaacttctagaataacagaaatatagggtatcttagtattgcaatgacaaactctgacaaaaggatatatatcagaggtggggactttcaacaaatattggactagagcaaataaaactgtcatatgcagttggcattattgtgtatttagaaattgcaagaaatactacagctaaatttttggaattaataagtttaccaaggttattaaatacaagaataatatccaagaaccaacacatttttataagacagaaatgaagagaacatacaatttgaaaagaaaatacaattcacattatcatcaaaattacacactacctaggaatacatctttttaaaaagttcaaaatatgtggattaaatgtaaaaaaactttgtcttatagatatccagatatagctatagctctctataaataaagaggcatgtatagtttttagagtaaaaataaatacatattttattttattttatttgcttgctgcaaaacttttgtgacatattggctccttaagcaatatttggaaacagggtaatactgttgagaaaacaaacatattacatttagagattcgaaatgagaatatatactttacaaattaaaccacatactttgacattttctttaaaaactacatttataaattgtatggtaacaccaatgtttatctattccctgggccaatctactaaattatcatgatatggataataatcctccatggcaatgtcaaagatggtatttaaatagacatttgatagatagatagatagatagatagatgatagacacacacataaaatttgtttgatttttattatttctatacctggagtcaaggggttaactgagctaggtgcaatctgattctttttattctaagtaaaatagccaggcacagaaagacaaatactgtgatctcacttatacatggaatctaaaaagtcagactcataggagtggagagcagaatggtgattacaggctggggaagtggggcgaatatggggaagatgagaagatgttggtcaaagagtacaaggtttcagttacacaagagcaatatgtttttgaaatatattgctaataataatgtatattttacaaattacgaagaggaaatttcagtctgttaaccaaaaaaaattgataagcatgtgaagtgatgattatgttaatcagtttaattcaatcattcactatatagcttaatttaataattccactatatataatatatagatttatttttatacttttatatatttgtatatagttatatatatctatgaatatgtagttatatattatttatatatagttacatattagtatatatatttatagtctataaatatatgtaatatataatatacattatgttgtacataatatatatgctgtgtatgaaatatataaatagttttgaggtacatatatctgtcaaaacttgatattatgcctcataaatatatatattattttctattataaaagaaaatattaaatataaatcaaatttatttatataccagtaaagcatataaaattatataaatattgaaaacaaacctatgtaaatatagatatacctctttatttaaaagacttcctacagccatggattggaaaacttaatattactaaggtgacaatattatccaatgtgatagggagattcaatgtaattccttaccaaaatcttaatggcattattttttggatagaaatagaaaaatctctcttaaaattcatgtggaacataaaaggacctcaagtaaccaaaacaatcttgaaaaacaagaaacaaatttgcaggactctcactccccagtttcaaaacttaatacaaagttacagtaatcaagagcacatgcagcactggtataaagaaaaatacagagacaaatggagaagcattgagaggccagaagtgaactctcaattcatttaccacgggtgccaagaccattcaatggggaaacggtggtctttgacaaatggtgttgggaaaattagacacccacatgcaggaagaatgaagttggattcttactttaagccatgtgcaaattcaatcaaattgaaccaaagacctaaatttaagtgataaaactgtaaaactcttaaaagagaacaagggaaaaatcttcatgactttggattaggtaatggcttctttaaaatgacaccaaaagcacagaccacaaaagaaaaattacataaattgggcttcgtaaaaattaaaaacttttgtgcatcaaaatacacttatcaagagagtgaaaagaaaacctacagaattgtttgcacagatgcaaagattctaattaaaacagtaagataaatctagtaaaaaatacatataattaagtgtagtttaatcttaaaaatataaattttgtaatacattaatacaattatgaaattatatacctaatataaagcaaaaacaaaattaaaaacaagaaaataaaaactatataatcttagatggcacaaacattttaaaataaaagttaatatccactcatgattttaaaaataaaacaacagcagcaacaatatcctctagcaatgtaagaatagaagaaaattttctgagtctactaaatagtgccagggaagaatcaaaagctaacatcaaaaacagtagtgttgtattgctcactttacccctaaaatcgagaacaagaaaagaatgtcctctattagtacttccagtagtgaggaggacctggccagaagaataaagcaaaataattaattaattaaaagtaataaagattggaaagaaagaacacagtattgtcattcacacataatgtgcttaagtacttagataatcgaatggaatctataaaaccaccaaacttctagaataattaatcagggattttagcaaggtctcagtgtacaaaattaataatgaaaataaattttatttccatacattagtaattaacatttggaaaatgaatatatcacttacaatagaatcaaatagtataaaattcttaagaatatagttaacaaagtatatgcaagatacctacactgaaaactgcaaaacccttcagataaaaatttaaaaatacctacataaaggaagagacctaacaaaagtgttgtatctagactatttgaagaatttcttcaacttcataaaaatattaaataatgcaacaaaatagaacaaagatttgaatgaatatttcataaatgaagatagatgactaaagaattcaacataatcatcaggaaaatgcaaaccaaaatgagttattactttacactcactgacctggatataatttaaaaggctgaaaatatcaattattggttatgtggagtcactgaaactctcatacattgcttatttgaatgtaaaatagtgcagccactttggaaaactgatttgtagtattttataaaattaaacacatacctactctttgacccagacattgtatatggaatgaaaagtataaaagaaatgaaatatgtgtccacaatagacttgaaagagaatgttcatagcaattttattaataatagcccaaacctagaaacatccaggtatccatcagcagaaaaatgagtggaaaaaactgaagcatattcataaaatgaaattcaacttaaaatattaaaagaacatacacagcaatatacatgatctcaacattatattgaatgaaaaaaattagatacaacagagcaaatagtgtattattaccatatgaagttaatgaaaaggcaaaactaaactttgatgatgggaatcagactactggttgcctgtgaaaaattaatgttctttgtttggattaaggtatgaattacttgggtgtattcaattgttaatacttataatctgtgcttgtaaaaatacttgtctgtaaattatacttcaatcatttaaaaaagagagattacaaaattttgagtttgagagtagaaattcaagcctaatcttcttgagccttttaagactactgggttgaaagggagacagaccctagcttactttataacactgatgatatagatttgaggtgagagaaaaaaaatatttttcatcatcctaatgaaatttatgtcttctcacatccacaatttttttcaatctcatgtctttggaaaatcctgcttcgcaaatatggaagagaaagctataccctcccctctaggaatcagaggttgtcctaacgtcctctttcacatcattctcttctataaacccagtgtccttaaaattagttaggcctatagtcaagtaagcctgtaataataaatatagtaagtggaactgccaaccctgtctttcctaatcttttgaattagcaaaatatcctttatccaaagggaagaaaagaaatcctgtgtcaggaggacataattgctatctctccagaaaagaatgccaatccatgtatctctctttttgtttttttagagagagagacagggtctctctctgtcacccaggctggagtgcagtggtacagacatggctaactgcagcctctatctcccaggctcaagcaatccttgtcctcctgcttcagcctcctgagtagctgggactacaggcatgtgccaccaaactcagctaattttttgatgtgtgtagaaatggggcctcactatgttgcccaggctggtctcaaattcctgtccttaagctaccctcccatcttggccttcgaaagtgctcggctgttgggattacaggcttgagtcaccacaccagcctccctctatctagaaacagaataaaggtgagggggtaggtaggcaggattaaacaaacaaaaaacactgtcctctgtgaatgatcgattcaaccaaattaaagaccatgtatcaaaaccctgcaccattctctctactgacaatcacactcttgcatagtccctcacactatagcaggagtggtctgtatgaccagttgacaacagcagaaattatggtatgttacttcctatattaggtcatgaaaacattaaagtcttccttcttctcccccacttccctcccctcttctctctctctcatcatctgttctgggggaagtcagctgccaaatcttaaagacactcaggtggctcggtggagaggcctattggtgaggaactgaagccttcagtcaacagccatgtaatgagccttcttgtaaagagacccccaaccccagtcaaggattcagatggctgcagccccagccaatggcttcactgcaacctatgagagactgagccagagctacccagctaagctgctccaaaattcctgacctgtaagataatatgcaattgttgttttaagccactaagtttccaggtaatttgttaccagtaataaataattaattcactaagaatctgtcataagtgtggcttctctctggattatgattactcacttactacagtggttcccaaaatgcaagcctaagctgaatcctagtagttcttctttgaatgcagcagctttgcccttgatacatgactttctctcagttcaattgtattaaatatttgaaacacagaaatgcctgcctggaccctcaccatgaatccccatcccttctgataccggaatctggttgctatttctagaacatttctcatcaagacattatcctaacttatggtttcattgctaattcatagacacttgtcccattatagagatctagtgatttccatgtgagatttttgccctcacacatgccaattccccttgttctacctgtttacctaacatcaatcagatgtcaataatggaaaagaaaaaaatcaagaagtaggagcttaagacactgtgtactggcagggctattgcttatttctgccgtacccctctttcttgtcatctcttagttcagatgccttggccctgtgcatagtgtgctctatctcatgaatctgaagtaaagagaatcaaaaggatgaagagctttaaatcttttgacaacatttaagagagaacaggaaattttcctcccttttcctggaagtctttgctgatgaatgaaaaattgggtttcctttatgtaacctgtcgatggggaggcaaaacttgtccagaaaaaataaaaatgttctcactgtgctatgttactagaattgtgatctgaagcctggagcagaacttacctatgctactcatctcaatccttttaggcagtggcactaggagccttactctgttcaaatttggtgccttcctaccgttatggaaggaagctctgtattctccttactttctcaacctttgatcctaacagaggcagtttctttttctttttttttttaattgatcattcttgggtgtttctcgcagagggggatttggcagggtcacaggacaatagtggagggaaggtcagcagataaacaagtgaacaaaggtctctggttttcctaggcagaggaccctgcggccttccgcagtgtttgtgtccctgggtacttgagattagggagtggtgatgactcttaacgagcatgctgccttcaagcatctgtttaacaaagcacatcttgcaccgcccttaatccattcaaccctgagtggacacagcacatgtctcagagagcacagggttgggggtaaggtcacagatcaacaggatcccaaggcagaatttttcttagtacagaacaaaatgaaaagtctcccatgtctacttctttctacacagacgcggcaaccatccgatttctcaatcttttccccacctttcccctctttctattccacaaaaccgccattgtcatcatggcccgttctcaatgagctgttgggtacacctcccagacggggtggtggccgggcagaggggctcctcacttcccagtaggggcgaccgggcagaggcgcccctcacctcccggacggcgcggctggccgggcggggggctgaccccccacctccctcccggatggggcagctggccgggcgggggactgacccccccacctccctcccggacggggcggctggccgggcagaggggctcctcacttcccagtaggggcggccaggcagaggcgcccctcagctcccggaccgggtggctggccgggcggggggctgacccccccacctccctcctggacggggcggctggccgggcggggggctgaccccccacctccctcccggacggggcgtctcgcctggcggggggctgacccccccacctccctcccggactgagcggctggccaggcggggggctgactcccccacctccctcccggacggggcggctggccgggcggggggctgacccccccacctccctcccggacggggcggctggccgggcagaggggctcctcacttcccagtaggggcggccgggcagaggcgcccctcacctcccggacggggtggctggccgggagggggctgacccccccacctcccttccggatggggtggctgccgggcggagacgctcctcacttcccagacggggtggcagccgggcggaggggttcctcacttctcagatggggcggccgggcagagacgctcctcacctcccagacggggcggcggggcagaggcgctccccacatctcagacgatgggcggccgggcagagacgctcctcacttcctagatgggatggtggccgggaagaggcgctcctcacttcctaggtgggatggcggccgggcagagacgctcctcattttccagactgggcagccaggcagaggggctcctcacatcccagacgatgggcggccaggcagagacgcacctcacttcccagacggggtagcggccgggcagaggctgcaatctcggcactttggggggccaaggcaggcggctgggaggtggaggttgtagccagccgagatcacgccactgcactccagcctgggcaccattgagcactaagttaacgagactccgtctgcaatcccggcacctcgggaggccgaggctggcggatcactcgcggttaggagctggagaccagcccggccaacacagcgaaactccgtctccaccaaaaaaatacgaaaacccgtcaggcgtggcggcgcgcgcctgcaatggcaggcactgggcaggctgaggcaggagaatcaggcagggaggttgcagtgagccgagatggcagcagcacagtccagagggagactgtggaaaggggagagggagagggaagagagggagagggggagggggagggggagggggagggggagggggagagggagagggagagggagaggagagggagaggtctaatttacaaatacaaattcttatgagaaaaattttaattactgaggatgtttggtttgaaaagaagattagttactaccagtattagtactattgctactatcacctctgctattagtgttactataaatattggaagctaaaatgaaccaagtgttcatcacagagaagtcatagtattaagttccctatacgctatctcatttatttctcacaatagtcctgtgctgaatgccataattatttgcattattatgagagttaggtgtgcctgaaagaagcaaggtaacgtcaccaagatcagagctactaaagaaagagcaattatcaagattcagatctttttgactacaaggcctgggatttcaatcactagaaataaaggtgtatgagaagtggatggcccagttattacataaacccacagaaaatgaaaatgaagaggcttaaatgaaagtggacacaccatgactggaaatactataggacttaattttaagaacaagcaataacgtaacaggcgtttgaagaataggcaggaccccatcctgaaaaccttaccctggaacactttcaggtgtgacagccatcctggctagacagtcctagcctggctggaatagatggttactgaagatcttgcccaaccctagccttctaggacttacacatcgtgtatctcctaggacggaacacagttttacctaaccttccagttttctccctcttgtttttctccattctgccttcccagtatttgcagctttcctccttttttttttttttttttccaactatacatgcagtggctgtttctctggatccagatgcagctcatcccaacctcatccgatctgagggtagaagatacacttcttcaacggagaatgttccccgaactgggatgcccccacacaccaaggacaaggggaatccaaaaccatcttcagtgttctgggtttaccacaggggagacattactttaccacaggggagacagacattactgggaggtagaagtaaataatggggacagaagttggaccaggaacgagatgagctctgggtgtttgttcagcacaatgaagagagagtggtggtttgtagaaagtccagagaagaatttctgcatggtgacatgtgaagaaggaagggtcatggctctcacttcctgcccagagactctgtcaggagcctccctgtccccctagaaggtttccaggacagcaaggctggagacgtgtcttttcacaacgaggtcgattagtcccacatctattctcttactggaatcaccttctgtgggattttccatccttattctagccttcagagtgctggcacatctgtgaccttctgcttagatcatcatgaaaattgtcctgattcttttccagttacccctgtaacttctttaacgagttgtgatagagatgttgcccaggaagctaatgttctattagcataataagcagcgaagtgttggcacctctgctgtctccactggagcatcttctaggtacattcaccaggaaagctgtccttggatggtgagtaggtcagtttcactaggtgtgatttcactttctgtcaaagaggaagaggcagaaagtgaagtgagagaactggaaaatgtccagggagatttcctccggtgctgctattggggaaatacagtctctttgtgggcagcaactatttctcacaagaaaactccaaacaagttcatggatttctcatctgttttcatgctgagtgtgtgttgaagtatataattttaaagctacatttacagggaaatctcttcttactatttttgttatcaaatatggaggaggggaggcgtttgaagggaagtattgcagtagagtgaattctcacttccattaccactgttggagatgcataggaatctgtccaagtcctttaatagctcagcgtgtttgctcttcaggctctagtgtacaatcaactgctaatcttggactttgacaagggacggagaaggctcatgaataattgtaaataattggaggaggagcccaagccttctggaaggaaagagcccttttctttaataagttctcactggtcagcaagtccagaattgtgtcctatgtgagaatgtgaatgaaagaggagtcaatgttgcagtttatactttaggagagaaagcagtaaagtagaaataaagaaacatctgtaccaagagtcattgctaacattaacattctttttcttcctgacctgttctgcccactgttgagggtttcccttgtccttgctgcatgtaagacttctccagctgtttatcatcaagttgtcttcaaggatatagaatatgagcttctcctgctttttgtttgtttgtgtatttttgtttgtttgtttgttttttctttgacggagtctcgctctgtcaccaggctggagtgctgtggcaccatctctgctcactgtaacctgcacctcccaggttcaagcgattctcctgcctcagcctcctgagtagctgggactataggcatgtaccaccacgcccagctaatttttgtattttttttaatactttaagttctagggtacatgtgcacaacgtgcaggtttgttacacatgtatacatgtgccatgttggtttgctgcacccatcaactcatcatttaaattaggtatttctcctaatgctatccctccccgctcctcccaccccacgacagaccctggtgtgtgatgttccccgccctgtgtccaggtgttctcattgttcaattcccacgcagccataaaaaaggatgagttcatatcctttgtagggacatggatgaacctggaaaccacaatttttgtatttttagtataagagagagggtttcaccgtgttggcccagatggtctccatctctttaccttgtgatccacccgccttgtcctcagaaagtgttgggattacaggcgtgagccaccgcacctggccgagcttcttctgttaaatgaaccctttcttcctgatgatggaagagatccccttagtttttcttctacagtatttgcagatctgtaaaccacaagtgcctctaacaatctgtcctgtagatgtatctccttggtgaaatttcacgtcacacactaagtggcaaagacagtattcgaagccaggaagaatcaagccagagcctagtcctaatttcactgaccctaaagggaggcttacatatttcatcaagaaataatcaaggcaggacagaggtaaataaatggtgataaaatattaatagttataatcaaatggacatggtggatgagaagggatttctggacatgcgagccctaaacatgggggtaacaacaaaacaggaacaaatggggtggaactgtggtatagaacacgaaatgtaacaggttcagccttagacattttacttttttatacacttaggacattcagcatgaggttcaagaggagtttttactatctctttttcagagtctaaattcatattttttctacaacaagattcttaaacttgtcacttctttactcattttaatgggtgtttgtccttctaagcttagagattggggagcagtggctgcaggtggacatggtagaaaacgtgaaggtggatggttgattggactcagagctttagacctgtcagggataacagtgtccatcttattttcatttgtagctttgagtaaatcaataagtagtgcagggtctccaagtagcctatcctttctggaaaagtgaattcaccacctggctacatcaattaattctttattgctggactactctggcactcccatttttagtaaagtttatgaaggtataataagacattccaaaaacagagtgactccactgcaaaaaagaaagacctgagggcaggaattatgtcttattaaggattgtatctctaggccttagcatagtacattcaacaggtaagatattcaataaatatcactttatgagacaattcatgcattttacaaatgtttattgataatcaatgtatgtcatttttacaggttgtggggctagacaagaaggaaaaaaatcactgtcctcatggaagttaaattgtactgacaaaggaggaaaatgtcagggagttaacaattcagtctctgtggcttcctcctgtcctctccctgaaactgagatccagccaatctgcacatttattctgagagtggccccactttaatgactacacccagctgtctacacaccaggagcggagggaactgtatcctgaggcaccaacccgattacccacccaacagccacagggacttccagtgactagggcatcatcctcaacgccaccaacccctctccttcctgtggcttttctaactggaactggaactcagaaagtacattaatcaccaatttgggaagctataggaaagtatgttttctaatatacagtgagagaatgtgactgataaaaccaattttcttgagactttctccctggaaagtgaatatatgtattcatagggccttcacaagcacagactaacaagcaaagagctacattcactaggaaggaagactcaaaagtaagtgaaaaataatagttaacctttagatgttgtgcaataaattatttttaattacattaaatcaaaatagtgttaaaatattttcaggtaaacctagtatatttactaataaatttaagtcttcataaatataaagatagatcaatgtaaatgtagaaatcatttgttaaactccagagattatataaacaaaaggtgaacctaatgtaaaactgtggactttagttgaaaataatgtgtcactattctttcatgggttgtaacaaatgtgccacactaatgtaagatgttaataatagcagaaataggggggagagaggagggatctaggagctctctggattttccattttattttgttataaatctaaaactgttcttaaaaataatgtctgttaattttttttttaaaaaggaaagaagcactgatacatgctatgacatggaagaactctaaaaatattaggctaagggaaagaagccacatacacatacacatacacagatagtttatggttccatttatataaaatattcagaatagaaaagttcatagggacagaaagtagattacctggggagtagggggtgaaaaatgggtagtaactgcttaatgggtatgaagtttcgtttagggcgatgaaaatattctggaactagaaagtgatgatgatggtcacacagcaatgtcacatatacaataccacagaactgtacactttaaaatggttaaagggttttattttatgttatgtattttaccacaattgaaaaaaatgtttattaaaattaatgtgtaaacatttgtggaagaataatgtgtagtttctaacatttatgtgtttaaatttatgagtttaaaaatagaaaaaaaaatgatggcccagaagagcaagttcagagtgctgttcatgagtgatccgcatgggaccgcgatgcctctgacgtctgccatcctggagagcagcagagcgtcactagcaggtcctcgtcttctcacttcataacattctttccaaaagtcttgttgacattcttctgtcttccacatatagtttatcttcttgaactcattataactttaaaatatttttactgtgttacatgtactgcttatatttgtttattttataattattaattttaaattgtgcactttattttgctctaacaataaaattgacatgttcgtatagatgatacataatttttcgcttggatcggaaagtctaaaatttttttcctgactcaatttcctgtatcaactttctcaaaaagtctggaggagggattttacaacacttcataagattttcaagattatattttagtgatcagatttttctcccccttatgcagctgtattttctttcacttttttttaactgtatatatatattttttattttctcagttccacctatgtggacaattaattgtcaccatcttaaataaactgatcaggccaggtgtggtggctcatgcctgtaattccagcactttgggaggccgaggcgagtggatcatttgaggccagaagtttgagaccagcctggccaacaaagtgaaaccccatctctactaaaaatacaaaaataggctgggcatggtggcacatgcctgtaatcccagctactcatgagactgaggcaagagaattgcttgaacccgggaggcagaggttgcagtcagctgagatcatgccactgcactccagcctgggtgacagagtgagactttgtctcagaaaaaaaaaaaaaaaaagaaaagaaaaaaaaaaaaaaagaaactgaccaaatccttgattattcctttcatttcttcctgtaggctaaattgtatttcccatgggattttctaagggtccttgattatcagatgtcagattgtgattgataggccggatctcagagaacctggaacaggataggtctctgaaaagatcagtctccagcagattttcctgagtagaattaaaacaccttgagttagtacttcaatgatcatggcagcccccttcaagcagttagagaaatgagaaatgatcaggactcagaatatcattctggtttccagaatcccagattgttattttcctgatacgttggagatgttcttgtgggtacagaaaaaatgtccagagaacctacattagggaaccaaagaatgaagcggggtgcagagtcccagagaaggaagttttggggaaggtgtagatagggcacttgccaatcatgttataagaggagaggtattcagaggcacggtcagggggattctgacttgttcaggggccaccttcaaggggatggggcttggaagagaggggatggcccagaactcatttcttttgcaatccattgcctaaaactcactgtcaggtgacacagagatgactctttctttgcaacatgtgcttggcaacctccgggacccatcgcgccctgttcccagtctccacctctcagtaccagctccctgacaggagttccctctggcccatagagcagatagtcagatctctgtgggatatctggctgcctgaatgtccatggatcacacgcttgttctgttcagaagaaatcagtctcaggtgagctgtgtttgaagccaatgtcacattcactgtaaagaaagagaatccattctgataattaatcaatataatttcattctattaacagccaaacaggaagacaagtgtttcacggacataagaaatttaaagtggaagcactttctagagcacacaaaacagcctccctaacacatgagaagtcaccagcaacacagaaatcaccaacaagtaggtcaccacatttttaaagatcataggaaattgttcacgccaacaaatctcagtgaacctcagctctcagccttgaaaacaaggatggctgtactactcacttttttcttcttcttccctaaccagatcactggggaatgggcagcaggaaatcaaatcattatcttttaatcattttgcttctattacaagtggaaacactgacctcatgcatcactgagcctggattgcatgataagccctgggctttcctgtttctcatgtttccttagttactggatattcactgactgcctcccataggtgacttgtgaaaagggaggctcggggaagtacgcagtacggttcccactgcagtgtgctccgctgtttctgtttccctgacttacctcttttcagctcctcttcctgggcaggcctacagccacagcaagaagcaatccccaaacaagcagtgttttccacaaaaatgtcatcctggactctaaaatggaaacccaagaatcccttgaaactgtgaaactgggacaatattaagattgtacttttcatctgagcagcttctaggctggagagaagggagagaatttggcctcccaggaagcagttggcctgctcctccctgctctggagatgcagaggagagaatgcaagtatttcatgtttgctcgtctcagaaatgtacacatgcacagacaagttttcccttctctcttccaactatatcacacaatcactggaatgacttgaggaggaaaggataaaattactcaagccgcaaccatgaagatggtattaataaaaatcagtttctaatccagaagaaaatcctccatgagggggaaaacacaaagttctgtaatttaattgttttcacatcagaagaagagaatttaaagagagagagtgaaaacagggtcaattacgagaatttagtgtgtatccaatgataaaaataattgcagggcgctagttgagggtgtcagagagaaactcagaggagtagaatccctgggtgtcctgaaaaccagctttgcagaggatagcaggagacctcgtcagagagcagcaaataaaaatcacaaaggaagaagagcaatacaatgagtaagtctgagttggtcttcatatttattttccaaacctgaaggaacataaggaatcaccaacctgagagagaaaaagttgcgattttctcctcgcccaaaaaggggatgctgatggaacaagtgacgtccacagcggagatgtttgtgacccttagcaatgtctgcacgtggaacagcccgtggctgccttgagtcagggcctgggaagatgatggtatcgtctttccttccatgtccctccatggcacgtggggctgtgggaaccacccatctgaagagcacatcggctgcatttctccatcttcttgcccctccacagtgatcagtggggaagaacccagacctggggcagagaaagcaaccaaagcctggggtcctttcaagtggatgagtgggcagcaatttcactgggaggaaagaaggggatgtggagggcttggggaagggagaaaagcttaagggggattgcactccacttagggatgaggctggctggagcattttcttattttgtttgtttgcttatttttattctttgtattcctaaatcattctgggatgattaagaggtaaggtaaatgttcaaatccaacatttattctgtccctgagaacaaaataacttcggccagggcatgggtcacatggacaggattaacatacggagtaggaggatattctcaaaaatcgaaaccttataaatatctacgtccaatggcagaaaatacgaggctcatgaaacttctcaacatgcgcccccatggctaaacgtgtttattaatttagaatcaaaatccgtgggagaaacacgtagcatatccaagacttgggcctatatgtactcaatggcatctgctaaccttggacgtttcaattctcacacacacggacagtgggaaatgatgctgcagggagtgatttcatcttttctcccctgtccctgccaaaactgtcaatatttataattttggtttacacagtggatccagtttagtcttcagatgattacagtttctagaattttattgcatttctcagaattctaataacacactgtgaaacaatgagccttttgtaaaatatgtagtaagatactcagatttccttaaagatatggtcaatttttgaagatactggaaaagatacaagttatatgcccaaataattaaatttcatccatttgagtttgtggattttaagtaactatgacagtttcacacactggaggatttgatataaatttgatgatgaataagcattaagaaaatttcaaatgtcagagaaattgtccaggaactagcatattaaagtggcaggagcaggtattgaatacaaaatatctatctagaattcttacttaccaccttcagatccaaactggcctcctggtagacatcatctttttcaaaaaggcagcggtactgcccgtcgtccgaaggtctggcactgagtatctgcagggtcagtctgccctcgtcaatggcgtcactcaccagtacagtcctccctctgtactctgccatctgctctccagccacatggtccccatccatatacacatgcacagcagggtaacggtgggatcggtcccacctcacctccatgctctgtgcattcgccttgggggacaggtaacaggttagctgtatatcttctcccactctgacgaggatgggctgggaaggtccattcacttttaaagaagctgttaaatagagtggacaaaacacaatgaaagaatcaaaatggaaccaataatgtcatctctaagaacagctccattggagtttagaaaccatgagcatcccagggttgctgtgaggctcagggtcatccttaggtgaggtgggggtttcatggactcagaatagaggttgctcttctttaaggaggaatcattccatgatgtgtgtcagtctgagtaaaacagtaattgaatccctacctgcttctacctgtatttttttcagtttacagaccaataataaaataattttgcaattaaaactcccagataggctgggtgtggtggctcaagtctataatcccagcactttgggaggccgaagcgggtggatcaccagaggtcaggagttcaagaccagcctggccaacatggtgaaaccccgtctctacagaaatacaaaaattagtcgggcatgatggtgggtgcctgtaatcccagctactcaggaggctgaggtggaagaattgctcgaacccgggaggcagaggttgcagtgagctgagatcatgccactgcactccaggctgggtgacaaagcgagactttaaaaacaaacaaacaaaaaacacccagaataaagtgaacagtttataaatttggccccagatgcctctgtacctgactccttatgtaacaaactgcaatttaacttagtacgtcaactactgaaagcctaacttaggttgcagtttgttacataagcactcaggtacagaggcatcctggggccaaatttataaattgctcattttattctgagagttttaattgcaaaattattttatgaataagcctaacttaggagctaaggctaacttaggagtacacttttgtaataaatagctgagtagcagctgctgcacttctgttagttgcaggcagccaactgttgaaaccctgttcaaatcggcaaacgccaggctgcaaccaatagagctgtctctgtacctcacttctgttttctgtacctcatttccattttctgtccataaatgctgtctgaccaaattgctgctttgaattctctgaaaccgttctgattctgagggatggcttgtttatgagtcatccttttctcagttagactctgctaaatttagtctgtctaaagtttttcttctaacacttcaattctgtatgattttaaactacttcttaatctgtcttaaactacttcttaatgcctcagtttcttaaactgtaaatttgctatacaactaccaaaatcataatgtttcagagttgaacaaaatagtttgcattaagtgcctggaagaccctgcagcgtgagcagaggtgcacagacctgtgagacttgaaggcgttggagccatccccaccctctgacgtggtaatagggaggggtttaaaaacgtgtctcatgtggacttttggtaatgatatttgaagaagctttcctctaggtggactttatagtaccttgtaagtctggtccagccgctatattttatttccccaatgctccacataggtggagttatagacacacaccagttgaatgtcctcaaataattttgaaaattaaaattaacattttaagatcaataattggggaagtcggcaaagtacaaattgtgaaacaatgatgaatgtaaaaaaggggtctaattctcccactgtgcaaagtggggaaagatgttctctgagggctttcctgggcccaagctatattacattttccattctcatcaggccctgcccgtgccattttttctctattctaaattaagtgtcgtccttttctgttaaatgataagaatggttttgcataaggtgtgatcatttataatagaaacacaagcataaaattgttggttctctgcatagagtcactggccaaaggcgttaacatcccattatgtcattggccgaaaactgccagctacctttgtagagaggaaagtccctgtcaacacaatttgaattttcagattattaccttccattccaggtaacagttgactcccagttatttccagcattttgtttgctttgtcctgtaattttacctaaaacaatattattttcctctcctatgtatctattaaagtctgaagacaagaatcagaaaaaatggactagggattagtttggggctgtttctgcatccacatggcttacggtaaattacttaataaaacagactgtttcctcatctcctttatccatatgaggattttattccctgtccgtgtgtgacctgtgcacatattagatcttaaactggcttgccctgcctgacataggtaattaagagctaaaattgacttcaatggagactgaaggaagcaaaatgtaagtatggagattcaattaatttgatgcattacagatacagacaaaactccttttgtccagaatccaagtaaaactaaagtttaaagtgctaaaaaaatcatgcagccctgtttgttaataattgatgttctactagaatacaagctccttgggagccactatgcctaacccactttttttttctttcaattttaagttccggggtacatgtgcaggatgtgcaggtttgttacataggtaaacatgtgccatggtggcttactgcacaggtcatcccatcacccaggtgttaagcccagcatccattagctgttcttcctgatgctctccctcccccatcccccaacaggtgtccagtgtgtgttgttccctgccatgcatccatgtgttctcaccaatcagctcccccttataagtgtgaacatgcagtagttaacctcctttttctatacggttttgtacacagccttccagacaattttgtgctgaaatatattgctttgttttgttttggttattgtttgtatgttctgaatgccttctgaatatccactgaaaaattaattcccttctggagcgtgaagtacactgaattatacactgattccttgaaacctgataatctcatcatcataccacataatcctctttcaatcagcatattcaattaatgcactatctcatttctcaaatatgctaagttatatctaatctcttagaactggacactacattagagattaaattcaacctgttcactttaaagatgagaaaaatagagatgaatgagctgacaaagtcacacataagtaattaaggacttgcactgttaagttagatagatgtagattagaaggtaaacatcaccatttcttcctgatttttggcaaaccatgtatgtctctaagattgtttcttagctgtaatatgaggataaagcaattaaactttataattattgtaagaaaaaatgaaataattcccataacatattcagcatcgtgcctggcatacaattaatatttttaaaaactattatttttataaatgaaaaacattatttgtaagactacaagcagtgatttcagtcttaggacttccatagagagctgggtgtcccatcattagagctcacctgcaaagcttccgtgcccagagccctcctctcccacctgacaggaagcaaagggaagctccatctttccgtgttggttaattgtggccccggaggttaccatgacttaggaacaacaggacatggggtcgtattgtgtgtgctgggtctccagtgggtctcagagaactcagaggagtgactcttctcctaaaaccttcttgagagacagacttgtgtcaacctgccccaaacactggctttacttcctgatctcagaagggtaagatacacaggtgtgtgtctctcctcagattgtggagttactttgcgccttccagggacccttccctttatgtttatggcctaatggggttgaaggtgccatagtagactctggtagagattgggttgtgtttgttaccctgattttcctcaaaaactcttttgtgggctgaaaggtgtgcttaagctcacctaaagcacacacatggatacacattcctggagcaggtgacttgatggagagcaaggaattgatggaaagagcacataagggatccacgttctatgcacctaggcagggaggcaggctggttgccttgggctgggagaagaggccataaaaaggagggagctagtaaggaggtaaaggggaaactcaaaggggctcagccatcggctggttatgttttaaaccacttatctcaggtgcagcaaaataataccctcagtccaactccgagatttaaaaaacaaaaattaggctgggtgcagtggctcatgcctgtaatcccagcacctttgggaggccaaggccggcagatcatgaggtcaggagatcgagaccatcctggccaacatggtgaaaccccgtctctactaaaaaaaaaaaaaaaaaattagctgggtgtggtggcgcatgcctgtagtcccagttactcaggaggctgaggcaggagaatagcttgaatccaggagatggaggttgcagtgagccaagatggcgccattgcactccagcttgggcaacagagcgagactccgtctcaaaaaaaaaaaaaaaatgcccggcgtggtggctcacgcctgtaatcccagcactttgggaggctgaggtggggggatcacgagatcaggagatcgagaccatcctggctaacacggtgaaatctcgtctctactaaaaatacaaaaaattagccgggcgtggtggcggttgcctgtagtcccagctacttgggaggctgaggcaggagaatggcctgaacctgggaggcggagcttgcagtgagccaagatcgcgccactgcactccagcctgggcgacagagcaagactccgtctcaaaaaaaaaaaaaaaaaaaattgctacactcacagtatcccaggttgcactcagaaagtaacagctccctcccaatagtgattagcttaggggtgtactggggtgaggagcaggtgcaggaccccatagcagagttgagcagggaggtgctgggtgcaacccaggttgtcataatgatgctgcccttgttcacacttgaaatgttttcaaagggcctccaggccccggccagctgtctgctgtcatcccccacacattctgaggcagctccctttcccctcaacacatagaacagagatgatgccatgcttcctataggtgtccatctgatgctcactggaatctccatgagcccccaaagtgtcaggtaacacagctgcaacctccttgaatgaggccattactttgctggtctcctctggtatttaatgaacataggacctggtaaaatcgtgcctcagtttttcctctgggtcacatggtctcgtggtagctcccctccctctgctggggagggcagaggctccctccacaggtgtgtgccagcacctcgtacttacccagctcagtctggagtttctctggaaaaagaacaagaataacatattaaggaatttggtgtaagggaaaggagagaaactattttttaaaaaagaaagcaatttatacattatatagggaagctcaattcattaaaaaaatgaaatgcagaaaaatactgattctttcccacagattacccaatgatacagctttttttccttttctctgcacaacaaaaatgctgtcacttctatctccccatgattctgttggtttcttctgatatttacagcataaatacttagctatcagcatgaaaataacatatgttccttttatagatacacagaaagtacaaaattatatggacataaacagtatcacctaaattacaaagtagagagacgaattatatgtaatatacaatcagcttcatttaaaattaaaatgtaacattaactttaaagtttttttaatctatccatttatatgaataactgtatacttatatccaaatgtggagggtatcctgaaagttttagtgcagttataagttatttaaggccagtaacttttatgtgattggaaatgtcaatttataggtagatgtcatgtttatcattgaatagtgcatcatgaggatttttttcaaccattaaaattatttaaaaatatctttttattaatgctataatgtatagtaagacaagattccacactgtactgttgtattggggggttggttgtttttgctgctatttataaataaggccataattaatattctattatgcaaatagttgtctacatctctgattatcttcatatgatagatttctagaagtaatcagcacaagacagcataggaaaacatttcagttgaagaaatatagctttattttctttacaatgcaatgaatacttgtgagtaaaaacaatcaatgcagaagaaggaaaggtagaactcaaaaataacgcaggcgccataacagctattcaagtaaaatgtagtgcgtatatttccagtcataaatgttttatggctttcaatacatattgctatatgatagataatgtctcttgataaaaatacgaggtgctatggtgcagtccctgggacctctcctgctgatctgagcatgtgggtcctagaggcagagcactgacctgggaggctgatgaccgaccccttctcctcagtgaggacggggttgtggaccaagcaggacacagactctgcagaggcgttcctgaccaccagggtggcttccgcatagaacaggccatctttatcttggatgcgatgctcagacacggccagcagcttctctccccggatgtcttcccaatacacctggggctctgggaaccagccccttgcagtgcacacaagctggactccactctccccaggtccctccatgtggatgctaggggcagaccccagacctgcagagggaagccacagctctgacacccagagcccacagaggcagaaatcacagaggctgagatcccagtgacgttgctcacagggaggtggccggagttcaggagtctgaggagcagaaagtcgacctcagtctccccattcaaatgtgagttcagatacactttatttgttccccagtctgggtctttacattttagcatctgaccagtacttttctccagatccagaaaggggaatcggagaagggggacatcatgacattttgcaacgcctctagcactgcaaacagagatgagctgtaatttattcattaattcctctgtgccatgaactctgcctttttcatcttaaaattatctgtattgggcacattgtctggtattttagatgatgtcttgaactccaatttgattgaagatttaacacaaagtcagaaatcactccccaggggcctgttcttcctgcatcttttgctggtggctgtgatcttcggaagcaagtggataaacgggagcatgtgaaatgcgaatctccacgaggcgttatttgtagctaaatattctattcaatgggtaagatggttttgagaaatcctagtttacaacagtttatgaaatcatgaattttttttctctatttaacgtgaaactcccacacccaaactaaggggactatattttccataaatgggaattctgtcttaatcacttgctggtaaaagagagatccactcccttcccttggacccttagaaaatgtgtgacttatttgtaaatgttcctgatattgaaatacatcagtacgttccctgtccccccatgtcagaaatatatgtattcctccatccattttgaatcaccttgaacacagtaacagtaatggatgttaagaaaaaaaaaggtattaggaaacagcctcccagggaagtaaagaaggaagcagtatcagctggagacgttaacatctccagagaactattttccccatttgccttagtaattggatttacttgattttctctttagagcatggagaagttagccctgtcagggaatcatatgatagtttacttttcataagacagatccattcttcagttgtccccttcttccctactccttcctgcttagctaatacaacagcaatatgaagaaccttcccattcacagagggtgtgtccaaaagcatctgtgagtccccaattcattgaacactagtatataacaatctccaaagcacgacattcttagccttttcagtcttgttgatagctttctaactgagggcatttcacaaggaaagaacattttcacgtctcagtttctgcatagatgggattgggtagagaaaaaccaatgccctgagatacagatgccggacgtcagctgggctcattcatgcagcaattggtttgctcttgcgcaccagccttaggtagcacaaatgtgtgtctcagcaaaattgctaaagactgcatgtcatggattccaaataatcctcaagaacagtcaaaactgtgcaaattaaatttgggaaaatattttaacactaagcttgaagactccagaaccacttatttttaaatcaatcagggtagaggactaagcattaggaattaccttgatgattcaaaaggatttcctcaactgtcacaaagcttaccacaaattaatatatctctgcctcttgagaccctgtgtctttccccagatattcacctgctactttgagcagcaagcttgtttctccacagtagttcccatcctggaaatggcaccagtattgtccattgtcggagggctggatgttgtgtatcttcagtgccacatttccctttgcaatgccattctctatccactctacccagcctctgtactcctccatctgcatctcagtcacctccactccatccctgtgcacaaacacaggtgtgctgggctctgagcggtaccacctcacctccacgtgcattgtggtcctcttggggagtagctggcaggttaacagggcatcttccccaaccccggccaggataggatgagcagggccaatgactctaaagtcttctataaaataagtgaaaaagaggaacgaggaaatgccaatcagaaaatcatatgcatgctttggggtgtccagcctgtcaaaatggaggcaactagaagagggagagatatatgtttaatgttttagagaaatccagcatgatgatttgcacatctgtttgttacagagtcaattttgtgtactgaaaacaaatgcagttcaaaaatgtgggtgaggttgctgtctgtcacctaccagctatgtgattcggtggcaaatctattactcttggtaagattttgagatttgaagtcctaatttcttcatcttcaagatattaataccagcatacctgggttgtttttattctcaagtaaattatttattccttgagtcatttattctcatgtaaattgactttttaaattggaaaccttattcttgttattaacattttattttcctgaagtttagataataaatccatttattagctttttttagcctttcaggattcctcttctcttagatataaaaactgtttttttttttgttttttttttgtttgtttttttcccgtctggagttggcaggaggccaattactgggactatgtacaatgcagttttcacaaggacattttgtgctggattaaggacactggtttgtctagagatttttgggtcttccaaacaaattctaagacatgtctgatctcttccttgttatctgcaaattgaagagatgtttaacagttatgtatgttattatgtttgatcattttatgtcatgtatgatatgttctttctcattctaaatgctccggggccatttgctctttctctgtgcagatccaatcctgctaggaagaacctcaccctacttagctgctgctgggtatcaaatagatgctgctcaaaaggtggctaaagagcctaagtggagatctgcttgtattcttcattgatgaagtctaaatatgaagctagaactgaagacattccatcagattgactgttacagggtagggagctgcagcacaagcacagagaagccagcagcttcatcacatcacaccagctctgcagcgccaaggcagacacaccagctctgcggcaccgaggcagacacaccagctctgcggtgccgaggcagagcctgcgccctctgatgctctgtgtcgtgttttttcccacttcgccatgctgcattttccttagggctctgacatctccttctgacactgattttttttttttgacactgaatttttaaataattatttttcaaggtgcaacattttgacgtcaaaattcagctagtgagatttccaaagtccctttcttctaatttcttatttccaagtattttttttaattgcagcttaatttatgataagaagcagctgcatttcttgaccccaaagtactagagtgaattaataatttaacgtggtgcaaccactgattcaagtgcttttaatgtctcatttaatcctaaagcctgtgctggcctctgagatgtagttactgctgttattctcattaaaaaggtgaaagaactaaggtatgaggtgctcaagtaactttccaaaggtgactcagctaggagtggaggagctcctgggagtggaggagctcctcaaaagtgaggagttcctttttggatacaggtggcttggccccagacttacactcttagatgttgttctcgacctttggacccagactagctcactgggacattagactatacagtaaagggagaagggaatcctacctgactgcttcattgtcagcaggatgaataggaaggaggcgactgcaccagacagattgtagcctggaaaatccaccatcctccctggaacaaagacaaggaaacgctgtgcctaagtgaggctgtgacacacccggcacactccatggcttccattggttatgcagtcttagcagagaatccacatcaacccctgcacagtcagtgaaatgggcttggctccatttctctgcaattactgatcacatccaaccctttacctaacgtgttatattgtgagacaatgtagcaaatgtaagaagccttgcttgctcatttcggcttgctagcatactttcacaaagcccctgctgtgatgacctgcagttctccagaaagatgcttcaaagacaaaacaagattgagcacacggcctcccatctctcttgcctgagtcactctactccttaaaagataagcaataatagtccttgccttttcctacacataagataacgtctgattgaaggatacctctgtaacctataaccagatctgctcatacacccaaacgttgatgtagttcggcttcaatgtagcttctgagctaatttgatgtagtggttaatatgtaacctcctgacatcgaaaaggatatggatttgtttctgaatcataaagttttactgattgttttgtgcatgaaatattttagtctatatattgtcatctgtgtccaatgattgtaacctctgtattgtaccctccagtgaaaaaagacaactccaatatgaagagcccctttctttctgcctgaacttccttacaaaagccttccaacttgtaacagactttggaccaccctcaacttcgttggtgtgtcttcctacatcagtcctgacatttgccttccaatagaactttatgaaattattcctgcctcagcaaccctaatttcatgagacaatattttaagcaattttttaggtgtaaggtagtcttgtgactgaaatgaaaaaacacttgaggtaaaggaacaataatattaaaaaaaccccaaaccaaaccaaagcaaacaaaactccttaggttcatctgttgtgagcttgcaaaacttatagagcaagattcaaatattttttcctgtcctcctcccaactcctcctgcaaagcctttctttaccactgttttctacacatggaggaaagggcaggaaggctctgcgtctccacactgcagccagaaagccaacattcagtgctagcgctcagagaacccgggacacagagatgccgtggaaagtgaaagaaagagtagtagaaagatagtcgggaaaatatctgtaagtggccttttagaatagacttaaaaacacgaatgaattaaaaaaacaaaaagcccaactggcagaaactggcaaacccagcaaccccactgtcccagctgaacaaaaatacttcacacagctaaaaactttaaaacttaccaggacaaggatagaaggctagttttaccattgaaaaatacaaacttcagagtgaaagaagtctaagacttattatatgtgatgtgtcaagtattttattgaaagaaaacttgcttcacacaaagtagagaaaccagctcaggagcaatgtcaagtcaattacagtttccccctttccaagaaactactgctagtaagattttatgggacaggggtaaaaatcaacattctgaaatggagatttaacaatcaaatgagtcaggagattgttgttacacaaatattgcccatttgctttataaaaaatatgtactttcatataagatatctctaaggaaacttatatgagcccattcacaatacctagatcgaaaagggcagtatgatatttatgtgaaaatggggttgggtgttagaagacagtgcagaccatgagcaccttgccacctgaaacttaccagtcacctccccttagactgaagggtgttgctgatgcctccctgactccttttgtgaaaagcaggaacatttttttccaccaagtaagagtaaagaaagccccacaacatccataccaagcatgatttctcagccttgtgaactaaaatgaactcacacttgctacagaccacttcagaggcttgcgttcctgtaggtctttcatgtcaaagcggtgggagggaaaatctacaagtgaactctcaaaaaaattgctcaaatcaatgaagctttcgaagaatgttgggagaatccatctccagtgctcagatagactgtgagagaatatatcagggaggataaccaccttggaccagggttcttaatgggcaaagaggctgttttgcccttagaggacatttggcaatgtctgggaacattttcagttgtcacgactgggggaggggacatatattgagtagaaaccaggggtgttgctaaacattctatgaggcacgtggcagcccccacaacaaagagtcatccagcccagaaggccggtggtgccgaggaaatgccctgccacagggtttgctgtcaggatgctgaaaagctttggcacattttttgaaaatagataactagacttaaattgccatctttaagtaaaaaccttttaaaatgataagcttttgacccctccgttttactatttggatgtaatgcaagaatcttctgaaactgctgttcctattaaatatagtaaattttggtgttgtcaagatatatgatctaatatgcaaatgtatcatcaaattctcaaaaacccatgtttaatttaatttaattttctggataaagtttaagtgttaaattgtaataataagtggtagcttatgtttaggcattagatgatgaacaattctgaatttcaaggcctatcctgcactgctaaaactcatatcaaagaaaattgcaaattactacgtatcatgggtcattagaacttttttcagtaaaagcctcaaatgttgctcctcaaaatgccaagcagccatagtaactgactggtaagaataaattaacttagttcaggaagttgaaagcttatgtatcttagttcacgaagttgaaagcttatgtatctatgtagacattaaaaacagctatagtttgtttttttcttgtaaatttgtttgagttcattgtagattctggatattagccctttgtcagatgagtaggttgcgaaaattttctcccatgttgtaggttgcctgttcactctgatggtagtttcttttgctgtgcagaagctctttagtttaattagatcccatttgtcaattttgtcttttgttgccattgcttttggtgttttggacatgaagtccttgcccacgcctatgtcctgaatggtaatgcctaggttttcttctagggtttttatggttttaggtttaacgtttaaatctttaatccatcttgaattgatttttgtataaggtgtaaggaagggatagactggattaagaaaatgtggcacatatacaccatggaatactatgcagccataaaaaatgatgagttcatatcctttgtagggacatggatgaaattggaaaccatcattctcagtaaactatcgcaagaacaaaaaaccaaacaccgcatattctcactcataggtgggaattgaacaatgagatcacatggacacaggaaggggaatatcacactctggggactgtggtggggtcgggggaggggggaaggatagcattgggagatatacctaatgctagatgacacattagtgggtgcagcgcaccagcatggcacatgtatacatatgtaactaacctgcacaatgtgcacatgtaccctaaaacttagagtataataaaaaaaaaaattaaaaaaaaaaaaacagctatagtttatcatatgttaaaacaatacatttttatagagaaagctaaaataagatttctaggagacaaagtgaattgggtttttgtgtgtgtgtgtgtgaccttggacatctttctttacttttttgagcctgtattttctctgctgtgtggtggagacaatcatcctaatgttttccaagctgtgtcatgaccatgtgacataagaagacgtcaaggctcagggacacatgccccacatcatccatgacaaatgaaaatgtgatcctggttttcttgtttttaatttcgtgcttcttcctcactcagcctgcttcacaagaacactgtgagggtcaaatgggctacaatcgcactttgaagactgcgcagtgggatataaatgtaagtgggaggcagtgtaacaggtggcagcatttccctaaaggacattgattctgtccgtatgtcctactctgtaatctgagacaatgtccccagcttcccgtggccatccttcaccagggaatccaaaccactcacgtgtctccctctctcctttggggcgaaacctggtgctactgggtcttctcacttagccccagatgtatcttcatccacatagcaggtggtcagaaacaggtcagagccctggggtgtgctgatcaaagacagaactgtgggagagccagagagtgtggaggcctcctccaggactttgggtgaaggaggatttaagccatctcaccccagttgaaggcagagccaaatcccggaggccctgtgaaaatgagattgcattctgaaaatcagaatagcacattcacctcctaacagctataatcctctcaacagtgaaactccggggacaagtggactttggctgggttcagttgtgaattctgcagacgtgcacacaaaatcatgacactggcaattctcaccttccccagaaagccaaggccttcatggaggcctcatctgcaaccccccagttaggtcctcacacagaccccaccgtcccacacatcagcgggtgctatccacccttccctccaccttgccacacatcaaagattcccaactagtgccaagtctccaccagagcatggcactcatcgggctggagttggaagcaaaactgaatatcaaacgtgccatccctcattccactgatgagaaaacagagacccagagaaaggaactgccctctccaggatcagagctctgggccaaggtcccttgtgggctactttattgctctttttactcaggtactttatctccctttgctgagtaataaaaggtttaattactctcagatgtttaccaaagaaatgtaataaccttctcagcataatatttgggcatgaagagtataatgataggcatattttgtgtgtgtttttgtttctgccagattttcctttacgttccccttaagtctgtgttccttgagctagagggggtctcagatatagtctcaggatttcaagagttctccagaacaatttttaatttaattgcagattttcatgtcaatgtaatgataaaagcatatgcagcgttatgatgttacaaggtttgagccgattttttccttaagtttctttccctcccattatgagcagcccataattgggtcccctgacttacggttacgattcttaatgtaagggtttccccctccatccttcagtctagacaaagaccctcccctcactgtagaggatgagagatttggagagaagagaaacaattaaacatggacgaggataggagggtctctttaccctggttctctctcaattggagtagaggggaatgaaccccacttcacctccggttcccagaatggtagcgatgcccacagatgtccctctcagagtggcagcaaaggaaaagttctccaaggcaagaagtggcagactctggaaggctccaacagtgggatgaaagtttgctgcctaaaatgctgggatggaatgttccagcaagaggagagtggcatcaaggacataacagtgatcgtcaccactgtgggaaggacagtgacgaccaggaaacacgacgggatagtgacatattgtgggagctgatgatgcaaatgtgaggagagacttctacaccagccctgctccgcctcccacctcagaacttagaaatcacacggcaggtgaaggagacgctgctattaaattaattgtgtgaaagcccctgaatttatctggaaattaccagatgaactcctctgtcagaagacataataatgcttggcatacaaattaaaatccgtaataggaaaatatagaaatttactttatacacctgaatgtgtgaaaagatgccgctcattgcatgcattctgtagtatcatctctatggtaccaaatgctgcaattatttgaattttttatggtcagtcacatcagcgccaactcaccgcgtaaagaagctccgtttacactcgcgtgtgtgtgttctcacaaatcatctgcatacactttctcagaggtctgcctgtgctgagaactgtgtcctaaattatgctacatattatgggaggtcattttgtgcaggaagatgttggtgtgtgggagagaaaaaaaggagtcacaatctctgcattctgactacagtccacctccaggagaagcgggaaaacaaggcataagctgctagaactgaggagagggaaaaacaagcatccggcgagggcaggaggaacaggagaggggagtcatggatctgcctggccaccagagggcagcagagacgggctcactgtcggcttcaaggatgttccgcaagtcgatttacttacagacccttcttcaaatgcggcggtcacctgtgacccacattcataactccctcagccactagacgacaaaagaagccctgagtttaggctgactgagattttcattctagctttgctatacatttgggcaagctttactttgggtaagtctgttctttccaggggtctcaattttcttagtttttacacagggatagtatgtgggtggctcacattaaagtatcgttgtaaggataaagtaagaatataatcatgatacaaaatccctttatagctattaggtgtcattactgggaatggaaggtcttggaaagaaggtggatagaaaaatagaggagattagaaatgaagataagaaatcaaggtcaatccaagaaatgtcaggagtgttgctatgaatatggagaagttcaggcgacgccatcagctgtttcttggggacctggttgaaagatgttttgagagctctcagatcaactcaccagaaagatgattactttgtggagtctcccagcagtgagacttatacaggtatcgtttcctcagggaaaggaaagaaaaatcagcagctctcatctcctggaggcacagtggcttgtcctccacagtcccctcggtttgctgactgactggaggagagagagcacctgcagaagccctgcgactcctcccccagatgtgagtggggggcctgggattcccgaggccagtgaggggagggtggtgctcacaggacggaggcctttcctcacagcgtggccacggttcaatctgcacctctggccatttttcttgattggcaaaaagaaggaaagaaggaaagaagaaaggaagaaagggaggaagggagggaggggggaggaaggagggagggaaagaaaagaaaagaaaaaagaagaaaaaaagaaaagagaagaaaggaggaagggcaggcagtagaacttctgaataggaaaatgcccaaacatttagggatggaggactgaggtattcttagttctggctgacctacagtctaagttgagctctttacatacatggctgtcatatactttacaaaaagtgtctgacaaaccagttcctctaaaacttttaattttaaaaaatttaggttgggtgtggtggctcacacctgtaatttcagcagtttgggaggccgaggcatgtgaatcacccgaggtcaggagtttgagaccagcctgggcaacatggtgaaaccccgtttttactaaaaatacaaaaattagctgggcgtggtggtgcacgcctgtaatcccagctactccggaggctaaggtaggagaatcacttgaacctgggaggcggaggttgcagtgagctgaaattgcgccattgcactccagcctgggcaacagagtgagactctgtctcaaaaaataaataaataaaataaaataaaataaatttttacttttaaatttacttttatgaaagagttacagaagtttaagacaatcacaatgatcatctattattttttgaaaatgatgaaattacctaaaattgattctactgcaggtgggagcctataagactaaagttcccaggaagagatgtaagcttcggtgaagcccacctcagttgactccaaaactaatgcagatgcccccttggggaattgcggggagagggtgtacagaatgtgttaataccatcacactcctcccaggaccccaaagaagctgcactcacagagatatccgggcatgtctcacactggaaatagggtacccttccaaatatcgggagaaagaaggcaaagaaaagcacaccgatctactaagcctcctgcatttgcacccatccagcctgccattcatcctgggtgcttttacttggtcctcttggggcctctgagaggctctccatctctgcgaagtacattccccaccgggctgttgcagttccacacatggccagtagatgacagttttgttcaagaaccgcctccaagattttacgactgcaccgcgatttcagagtggcgggaaggactgagagtcccattaagaaacttcccaaatcttaactgccaatatctttctttctaaaattgtgtttttgtatttcgtggtaaactcagttcaaagccgcggatgggggcaggaataggaaaactgctgctgctgctgaatatgcttctctctcttaaacgtcccagcagaattctgccactgaaccaccctgggagaatgcgggggaaagagaggaggagagaaggacagagagagagagagagccagagaggatatgagggagatagggagagaggactgcttcattgtcttaaattcgttgtaatcacgtcgcaataccaggcactcattcttaaggtagcaaagcagaaaatattataaattcagttattaatgtcattttcacttttgagagtagagaacataggcactaatattataataattcaataactatgaaggaatcaagacaatcttcagggaggatgtggtgcatggaatggaatgtaaggaatcgttcatacttcatgtaggtttagcatttcttgattacaagctaaataaggggtggattactcatgagttttccgggaaggtggtgggcaattcctggactaagggtttctctcctttttagaccatatagggtaattttggatgttgccatggcatctgtaaactgtcatggcgctggtgggagtgtcttttagcatgctaatactttataattagcatataatgagcagtgaggatgaccagaggtcactcttgtggccatgttggttttggtgggttttggcccgtttcttaactgcaacctgttttatcagcaaggtcttcatgacctgtatcctgtgcagacctcctatctcatcctgtgactgaaaatgccttaacctcctgggaatgcagcccagtagctctcagcctcattgtacccagcccctattcaagatggagttgctccggctcaaacacctctgacatttgtggacacgtagaaaaggataattaatgggttagcaggatgaaaggaaaactatatcccaaaggatagcctagccattgaaattgatatgaactggaatatgaaaataattggggacaatttagtttcatgaccatatataaaacatttaactatgtctggttgtattttaacataaaattgggcatgggaaactatttttaaaatattctttattttttaaattgacctggctttttctttcaacttttattattttaaaaattagtttaagcctagcagatttcacataatttcagactccttttggcaaacagtaaacattacagcctggaaagcttgattgcttatatataaaaccctaagagagctattgaaaatgcctagaatgtgtgaatttaacaatggtaaaatacaaaaacaaattgtaattctatacaccacagcagaatatcacatataaaatttaaaaatcacttcattatgacagcaataaaaacataaaatacttagacataaactgaaccgaaagatgtgtgatgtgaaactataaaatactgatgagagaaactgataaaattctaaatgtgtaaagagatataatatattttgatttgggaagaattgatatttttgaaataacagttctcaacacaatcttgatcaatattcccactgggtttctttgtggcaatagacaattctaaaatttatatgaaaatacaaaggatctacaatagccaaaacttatttgaaaaaggacagaagaaatatgcaaagcttggtttcaagtcatgcttcaaagctatgggcaacatgtcaaggctagtaatgtaagttagagaaacttcaacaaagaattgtgcttagttgtgggaatccatgggagattctggaatgaagatgcataggaaacaaatgcaagagatgagtcctgggccctcagtcatttagaggttgggaagatgggagacttggcaaggcaggctgagatctggctgttattctcgtgtgatgagaatctcaggacagtgaggtttagtaacaagtcaagaaaatacatcaatgatgcagtagtggttaactacataaaatgcttctgatatgatgaataaaatgacatcctagaaatgaccattggatttggcaacatggagctaaaacatgtcagtgacaaggagttcagttaaagatgtggactgtagcctggtctgtgaagagtggaagaagaatggggaggaatggaaataacaggtgcagcccaatatttttaagagtttccttcagattagaagtaaaaattcattagcagagttggatttagggaaaaggaaatgcagtggcatgtttatatgctgattggaatcactcactagagagaggaaatttttttggtaaactggataaagatacttacaacatattaaactatgaaaaggattagtacccagaacatagaaaggcctcctacaaatcaattagtaaaggactatatttttctgagaaaaaaaatggtaaaggcaagaagaaacattttatagtaacatgtataaatgacatgtgaatatgtgaaaaaatttcaaactcttcattataagtcagagaaatgtaaataaatgccacactgaaaaaacaataaaaatatcaaaacctagcaaggatgtgggtcaatgtttctaccaacagacttctgaaggaaatagaaattgttaggatcattttggaaaacaagtcagcataacatagtaaggttgaaaatatatatacattatcatactacattactactacaatgctactctagaacatacatcaagaactattgcaagttcattacaacttcattcctaatagcaaaacatcaaaacaacttaagtatccattaacaactgaataactttatatattttcatatcaattatagttatttatactatatggttatttatagttaaattcataaatggaaatagctttttttttttgagacggagtcttgctctgttgcccaggctggagtgcagtggcgtgatctcggctcactgcaagctccgccttccgggctcacaccattctcctgcctcagccttcccagtagctgggactacaggcgcccgccaccacgcccggctaattttttgtatttttagtagagacgaggtttcaccatgttagccagggtggtctcgatctcctgaccacgtgatcctcccgccttggcctcccaaagtgctgggattacaggcgtgagccaccgcgcccggccagaaatagcttttttagggctggtaaaatggccttcatctagattttctcatgcttgtttgtgaattggctcccctctcgatgagctggtgcactatcattatgagttttgtgcaacattgagttcttgcttggcaagttttgtagaatttctttcctgggttttgcatgctgaaaacatggcttcattgggcattggtaaatcaaacggagaggaggcagtgcggcaagtacaaagaccatagttacaatactctaaaccaaaaatatctgagacagatctcaatcaatttagaagtttattttgctagggtttaagacaatgcccagaagacaagtctgtggctttctccaaagatgatttagaagccttcaatatttaaaggtgaaaagcagactggagggagaattgaatagctccaatagtgtactttccttggtaattttcactcttccttggactatcacataggttgaaactctgatatatgtcaaggttgtaaaccaaaaagtatctgagacaggtcttaagcaatttagaagtttattttcccaaggttagggacatgcaggaaagaaaaaatcatcaaatgacacaggcaatctggtctgtgtctttctccaaagatgatttcaatatttaaaggggaaaagtgggctgacagggaaagagagaaggtatggcaatccacatgttgcaaggaaaaaggggcaggtaggggaaaagtcagttatgtattcatcttgctctcagtaaatcatcgctttgcatatgattaggtgaacatagagtagctaccggtggggatatttttaaccttttatctgtagctatctgcttggaaaccaaaggaaaggcaatttcttgcgtgactcagctttcaccttaattctttccttttgacatggtgaattggggtgccaaatttttagtttcctttcacaatttatacaaaacacaactcaacagacatcctcatatcccagtgtatgtggcggctctggattctattcctgctcacctggacctgattgatctgatatcggcagcttggaaactacttaggtagattgtggggagggaaacgttccagctaaccatgagcaagtaaaatacaacttcacatccatcattatccagccccaaatcattcaacatctagataattccttagagtaagggaacaagataatggccacaaccaagtaggaaagaatcacgtatacagacgattttcattcccaaagatcagaagatgtaaatgcaaagagaaaaagtgcttcctacgatgccagctccagcttgataagaatatatgctatttattatgtgagggggaaacatgttcaatacagctagctgcttcagcttccatgtggtgtttgatacctgtgttccttttcatttggctcaacttccattaagcacaaaaacctcacaaaatgttcaaagggctagagggacaaatttggatttcatgcctcacaaataaaggaaggactccataagataaaaatacgctttccatagaaaccttggaagtctaatatgtggaataaggtgaaatagaaacagatcatccttcataggaactgaatcttgagttctaactaactaatcctagactagatttgggtgatttgagatattaatgaccttagcctcatagcctcattgcctgacacaagcaaaactaaataacctctagagaaatataatatttcctggagcctcaaattatcactcatatttttcttctgcatggcatcaattaaaaaatatataagaaaacaaaaaataataaaatccaagaaaaacataacagaacataaatatacgactttgacttctctgtgggatactgccagattaactcaacactcccagtacaccagctagaaaagttaaaaatttaaaacacaaaattcgtactttaaaggaaaaggagagctgtggaagcaacatgcactagatgaaatacaattgcagagaataggtgacccttttgaggtgagctgacaatcacagctcttcccctgccacccatggggcatttgccaattcattgttcatacagaagaggtgtcatgggctcaggagggaatctgctggagaaagggaaaccaagcaagggacacagggacagactaagaaattagatatttgaggttctcaaattctcaaattcatggcgtgatttccccacaagatatttcttgagctgtggtgcagcactgagctatgagccaggccccaaactccaaaggcagaatgaggactcctccatgttgcttgtgttcaggacacggagaactgccttcagcctgggtctgtcgagcacaaggtgggtctccccgttttcacatgtgcctgctcctgaagccacctgagaaggaggccagggagctgggccagcaagtactgaagttcagggctgaatctctcactgacatttgtaggaacagagacctacctgggtcttaattaaaagctctggaaggagagtcatggcctctggtattgacggagtagtttgtattgaaataaccctcttgctggtaacaatgataaattctggaccaccttcattttccaatttatttcattgtgttgtgataagaacaccttacatgaaatataccctctttacaagtttttaactacaacacagtattgttaactataggcacaatgttgtatagtagatctctagaacttattcatcttgcataactaaaatgttatattggttgaacagtaactcccccatttaccttgcccccagtctctggcaaccaccaacctattctctgtttctatgagattggctacctaggcacctcatataagtgggattgaagcagcctcgtttgtctggggtgacctgaggtttgttgtctcgtggccatagagatcaaggatgcagacacacaaaaagtgaggctaagagtggaaatttaaagaatgtctttattcctgtcttcgttttgttatttacccagtagtcattcaggagcaggttgttcagtttgcatgtagttgtgtggttttgagtgactttcataatcctgagttctaatttgattgcactgtggtctgagaaactgttatgatttccattcttttgcatttgctgaggagtgttttacttccaattatgtggtcaattttagaacaagtgcgatgtggtgctgagaagtatgtatattctgttgatttggggtggagagttctgtagatgtctattaggtctgcttggtccagagctaagttcaagtcctgaatatctttgttaattttctgtcttgttgatctgtctaatattgacagtggagtgttgaagtctcccactattattatgtgggagtctaagtctctttgtagatctctaagaacttgctttatgaatctgggtgctcctgtattgggtgcatatatatttaggatagttagctctttttgttgaattaatccctttaccattgtgcaatgccctcttttgtctcttttgatttttgctggtttaaagtctgttctatcagaggtgtttatagtattctctgatggtagtttgtatttctgtgggatcagtggtgatatcccctttatcatttttattgcatttatttgattcttctctcatttcttctttattagtctggttagcggtctatctattgatctttttttacaaaaaaaaaaaaaaaaaaaaccagctcctggattcattgattttttgaagggtttttcatgtctctatctccttcagttatgctctgatcttagttatttcttgccttctgctagcttttgaatttgtttgcccttctctagttcttttaattgtgatgttaggatgttgattttagatctttcctgctttctcttgtgggcatttagtgctataaatttccctctacacactgctttaaatgtgtcccagaaattctggtatgttgtgtctttgttctcactgcctgaaaggaatttaacccataaggaggccaagtcaatgctagctttcaaggcttttaagtacagataatggtcttgcttgagggcaatgttgcaggctacaaattaaagccctttgtgatccagcaaggtgaaaaccccaggaccttcctttaagaatataaaaagaggccagatacggtggctcacgcctgtaatcccagcactttgggaggccgaggtgggcggatcacgaggtcaggagatcaagaccatcttggctaacacagtgaaaccctgtctctactaaaaatacaaaaagttagccgggtgtggtggtgggcacctgtagtcccagctactcaggaggctgaggcaggagaatggtgtgaatctgggaggtggagcttgcagtgagccgagatcatgccactgcattccagtctggaagacagagctagattccataaaaaaaaaaaaaaaaaaaatatatatatatatatatatatatatatatatatatatatatatatatataaagtataccctgccagtacactacaggtgtaataaaacatcatggatgacccatctcctcttccatgattacatcctaaattgctatgccagagaaatagagaggcattgtctgaaaaataccatctttcaagattttgtttatggttatttgttctcctgcacatcctcctgttattaatgatctttatcccaatatcgaagtggtgcttctccctctttaatccaaccaatggatcaaggaattatagcagcttttaaggtttactatctgaagagggcctttgcccatgttattatggtaactcaggaagacactgagaagacagtaatgcaattctggaaggataacaacagctatggctacatcaagaaccttgcttgggatggggatgatgtcaccgaggagtgtgtgaatggcatctggaagaagacactcaggaggtttgtctgtgagttcaaagggtttgccaaggatgaggagattgcaaaaatctacaaggctttggttgagatggcaaacaactttaaactgagtacggatgaggatggcattaggagctcctagaggtagttccttggaattgactaatgaggagttgttggaactgagacaggaatgcatagttgaagtagtggtcagaaaaaaaggaaactgaaggagaagaagaagaagaaccccaaataaaattccctgtgcagggtttagcaggagcttttgcagacctcaacaagctccttaaaaatttgaaaacatgaaccccagcacaacaaggttttcattaataaagaggaatgttcacggtgaatcatctgcttataagcaaatctatgatgaaaaaaggaaaccaagcaaaccatcatggacctgtttctgaagagtgacacctcctcaagaagagcctcaagcaggtccttcaggaggaattccagaagaaagtgtagttatcataggagatggcctctccatgtgtgctatggcccctgaagacattttggtaggacaagatgtggaagtgggaaacagtgatattgatgatcctgactctgagtaggcctaggctaatgtgtgtgtttcttagattttttttttaagtttaaaaagtaaaaaaaaaaaaaaaaaaaaaaaaaattaagtagaaaaaagctcatagtataaggatataaagaaaatatttttgtatagtgtttgtgttttaagctgtgctattacaaaacagtcaaaaagttaaaaaattaagtatataaagtttaaaaagttagagtaagctaaggttaattattgtagaaaaacatttttcataaatttaatgttgtcttagttacagtatttataaagtctacagtaatgtatagtaatgccttaggccctcgcattcactcaccactcactcactgactcatcagggcaacttccagtcctgcaagctccattcatggtaagtgtcctagaaagatctaccatttaaaaatctttcatatggtattttcaccacaccttttgtatgtttagatacataaacagttagcattgtgttacaattaccaatagtattcaatacagtcacatgctgtacaggtttgtcgcctaggggtaatagggtgtaccatatagcctaaatgtatagtaggctataacatctagtttgcgtaaggacactctgtgatgttcacacaaagatgaaatcacctaatgacacatttcttagagcttgtccctttagctaagtgatgcatgacttcagttttgccccatttctagagcatagtcctcaatgactttcaatgaaaaacccgatagctttcatcttctcaatcctgaagagctgaaggagatttaggctgaacttaaagaaattttcagcttagctcattagtcttctactccatacatcttcaacatttaacaagtgttttgaaaaagacacctacaaagtgcttgaagtcatcaactctcaaatcttgtcattgcagcaccacgtcaaatgacaaaacacttgctattttcttagtccactggaggagcctattgtcagaggccaaacctggattattagctccaaacaagcactcagatcagtaagtgtcctcaggtgataagtggttgttgctacttggcatcaattcaccagttcttctgaaacttacgtctgttttgttttagggcccttatcaatggtaggtctttgtttcctcaacaccactggacagtgaaagattttgcactgcctttcagaagttgacactttagttttttgttttaccttctaccgtagcatcagaagttaaccaacgtgttttgaagaaaccagagtgtttgagatgcctcagttttctagttacatcacactggccccataattgctgctgatttctttcttacagcagaaaactgtaggaaaattgtagcagaaaacttttctacagcagaaaacggtagcagaaaaatggcactaaaacgcagcgtacacttgcaaacagcaaatgctaccaagagaaacagtgatgtccaaacgtcagcttacatttgcatggttcttctttggaatttttattcatctagtcctatttactttcttagctaaacaatgctttttaaaaatatacctttaaaattttatcctatttttgtagttgttgccagtgggacaatttgtcctactgtgaccctaatgcatcttatactgtggtggaaaaaagaataagattttaaattgtgctttctgaaaaactggatatagaaacagacaatggccagaccatatataaaaataggcctggctgggcacggtggctcacgcctgtaatcccagcactttgggaggccaaggcggatggatcatgaggtcaagagatcgagaccatcctggccaacatggtgaaacccctgcctctactaaaaatacaaatttagctgggcatggtggcgcgcagctgtagtcccagctactcgggaggctgaggcaggaaaatcacttgagcccaggaggtggaggttgcagtgagctgagatcgtgccactgcactccagcctggcgacagagcaagactccatctaagaaaaaaaaaaaaaaaatagacctttgacccacagcctacagcagcctgcctggggaaccaattcccttatcttcaataaacaatccagcaaggtagtctgcttaagtccgacttgcaggaagtcagattgctgtctctagtaacaatccaggaggctaaataataacttttataacaattgttttaaaatggccaggacttgattaataactgacagttcccccaatatttgtgcctgcttccaacttaggaccaaccagggaaagctaaatatgcatcctacccaattacataggatactccacttctagttaccccttaagcattccccatgccaacagcctccaatcaggtcctttttaaccactataaagtttcctacttctttgcctgtctttgagtctctgccaaaatgcaaaagatggtggctgactcctttgttatagcaatttgtgaataatttttgctcttttcatttggttgatcttcatgtattttcacattattaagctttatataaattaaaatccaagaggctaacatttaattaatgacatttaagatcttctatatcggataatgctatacattatattaggtttaatatttctattaaatatagatttagtaaattactaaaaatgctaaaaattcatcaaatatatatgtaagtacaaataaggaaaatgcaaagagagatattagaaaggggtaatatattcaggaataaatattcaagatattttaagttggagatattgtctgttggtactaaatcaatttccccctgttttgtgcttttttccatatcacttggggttgaagcctggacaccacttcttccagagtccctttcttaggaaggcactcacttgcgattagaaggcagtggaaaattgctgtcattctgcttctgacagcaagtagcagcagctgccaggagtgtgggtttgtttagtgctgcagggccaatagtagcttcctgcagttcctgacctttggaagcacaattttgctttttctgtccttacaaaacttttgcaatgcacttcactgtattacatctctctgggcttaaaataccttgagtgtgttttttcccccttgtaaatctgggctagactgaataatcttgtaagtatgtaaatataagcaactattttaaaataacctgggtttttaaatgtaatacagatgctcttcaacttatgatggggttaactcccaataaatccagtgtaaattgaaaatattgtgagttgaaagtgtagagtataagttgttcaccttcatgatcatgtggctgaggctgcctggcattgtgaaagagtatcttactgagtatcgctggtctggaataagatcaaaatttaaagtatggtttatacagaatggatattgcttttacaccattgaaaagtcaaaaattcctaagtcaaaccatcttaagtcaggtgtgtctgtagttttaaaaaaattacaaataaagaatatccagtgttgttgggagtgcagagaagatttacaaggtaaacattgatttgtttaaagtttgagagaaaaaattagataatatgctttatgatttttaaatgttaatttcaaagtaattatacattcacaggagttgatgaaaatagtacagagaggtcccttgtacccttcacccagtttcccccaatggttacatcatacataactatagcacaatatcgaaacaaggaaatcgacactgatacaatgtatttgcagttttctactttatcacatgtgtagattcatgtaaccaccactgtgatcaaaatacagaactatattccatcaccacaaagatcttcctcatgccactcgccctccttaagagtcacaccattcccccacccccaccatccctacactgtgccaaccactaatttgattttcatctgtataattttatcatttagaaaatgttatataaatggaattatactatatgtgaccttccgagactggcattttgtactcagaataatgcccttgggatctgtattaggtgctccagagcggttgtactaacaggatatgtatatatagaaagatatttcttttaaagaatttgctcacatgattgtggaagcttactgagtccaaattctgatggaagaggccagcagtggaggagactgggacagagttgcagtttgagcccaaaggtagtctgctgtggaaccaggaagagccaggattgcagatggagtctgaggcaatctgttggagagttccctcttatgctagtcaggcattcaactgattaaatgaggggaacccagttatggagggcaatgtactttacttaaaatctactgacttaaatatgtaactctcaccccaaaactgccagattatgtgaaattccatgtcctctacttggctccattgacactcagatggagtagattaaacaacagacatttactgaaagtcctcacttaacatcatcaataggttcttagaagctgtgactttaagcaaaatgacatataataaaactaatttgaccataggctaattcagcgatccccaacatttttggcaccagggactggttttgtggaagaaaattttgccatggatgggggttggggactagcggtggcagggagtgggatggcacaacctagatccctcgcatgggcagtccacaatacagttcacaaaggtttgcactcctgtgagaatccaatgcctctgccgatctgacagcaggccattagtggtctgtggcccaggggttgggaacccctgggctaattgatgcgaacaagatttaagttcctatggcttatttctggtcacaaacacatcaccaaactcctaaataaagactcagaacacttctaatattaaacattaaaataaatgggaactatatatacatttaaggtaggtttataataacaagtaagataattaattatccagtttttggtgaattagtgagtgatggtggtcacagtggtggtgggttacattaaggaacaaatgtttgtaaaatgaaaatggtaaggagcacctcctgccaccacacagctcaaacgcaaagaagaacaaatacgttgaactcactgagtacttttgtaccccattgtttactattgtacagttgtatgaatatcatgtactttacaaatttttattttagaaacatttctattcattcgcttattcattttccaacctgcttattccagttcaaggtcatggatgactggagcctatcccggcagctcaaggacaagagaggaaccaaccttgtataggatgccatcccatccattgtgggatgcagacacacacacacatacacacacacacacacacacacacaaagtcactctgctgggacaatttagactcaccaattaacctaacatgcatgtctttgggatgtgggataaaactcaaatacacaaagaaaacccatgcggacgtggggagaacacacaaactcctcatggccagtggccctggccaggaacctatttattttctcaccaacattgtaacaaaacgttgaacaaaacaatgctataggaggaccctctgtgtttctcacagtcctggaggctgggaagtccaagatcaagatgctgacaggttcaattcctggtgaacttagaactgaaggctctctggcaggggtgccttgtggctgcaggctgggtatagaaactcaggctccccactaggcctccacttacagaatcctgactgggagggagagggtctcatcagcgctcccacatggcctctactgacaccaggaagggagaagtgcctccttacacctggacagtggtgaaagtcccagctttctacttggcctcctctgacaacaccttggcaaagtgggtgaggagtgcttccttgcaacagggcaggtggaagtccaggctcttcacatgggcttcactaacaccacagtgtggaggtggctgattactgataggcaggggcaaaagtcctaggtccccagttggcttcctctgacataagcctgatgggtctaggtagtgtctcattatcgccaggcaatgggataagacaaagctcctcactcagtgtttgctgactgaggcgggatggaagcccctgatttttctgtatttgactggagtagtgcggttactgtcagttatctgcctggtaggctgctctttcttgttcccttggatagagaaacatgctttccttaggatatttttgtctgtgactactgatgtttcctgttttccagtttctccagcactcattcctggatatattaggcagaaagaagacctatgaaactcaccactctgtcattccccaatcccatggtctgaggccaacctgcttctcctctccatcattcaagggctttttatgtctgtctgtagctgtacttagcaggaagaataggaagaattgtacctacttcatcttgtcttagaaccagaaatctctcaccatattttttaaaatatgtttttgtcatatattaaaatattatacatctatccttagatccttaaataaacatataatctatccttagagttaagttaatttggtaacaaaaataaaacaagactaaaactattaattgtgttaaagccataaaaaatatgcaaatttttgcccaaaatatgggaaatgtgcgtgtgtgtgtgtgtatctcctatgtatacacataaaaaaagacataaaatgaaaattgctgatgtatcaatacccgggggcagggagtattctcaggtttaactaagtactcatattcaagtttttaccataggccacacctggctctcagattcacttagaaggatattagacaggagtcaaagtatgccaaagtgctgaatcaggtctttttcttcagtgggagaagttcttgaaacagttcataatttattccaggtgctagtttcatcctctgcccccatcccccaagtgacaactcaggtacaaggagctgaatttacacctgtggaagttgtgtccaccgtagcttagaatcctcatgtcatctacgagctagtacctcttataacaaacccatgggcacagcttccagagtccccgtaaagggcatgctcagttacaagggtcactgcatttggaaatacccaaactatgggtccccgtcatttgttacggttcatgaaatattcttcccagtaaagatacaaaatgccaaccagaagccatttgtgccataagcaatgttgtctaaaaatccagctgacattcttcctccatcaggtttccagaaaacagctagaaaattagcctaagattaaatacatcatggagaagtagaaagggtgttataaagcatttatccacaagattcaaaatgaaatacagttaattttgtccgttttaagacattatttcaaccttcaaattatttaaaagaagtacatcctatattttgtgtgcttattcaaaaaaggcatggtaatacttataaaaagactttaaatatttttataagttttaaatattttataagtaattttataaatgaaattacaaaccatttaagtgacctaattaaatcaaacacactttgagtatgcacacaagaaaaaaattagttgaagcatcctgacttaagaaatccttgatctttcataaggtgtctgaatactcaatgtcaaaaacacttatgaagaattaaacactgttgaccacaagagggaaacctagtcccagttatactataaattagaaaatcaagggaaaaatatgtgtcctgagaacttttgaaatagtcacatataaacatagtatacaagaaaaaaccaaccgtcatccctacccaaggatatgtttgtggtatgagtggttttagtgttttgagtggactggttcttggactccacatattattggctacagagatagagacttgatttagaaaatcacagttgccactttctaagtaagcccttgaccaaaagactagatttctttaaacccagttttctcaggtaaaatggaaatacaactattatctaataaatataagtaagctttagtgtcatagtcatagcagtagtattttcaattggtaaaaagaaactggaccccaaaaaagaatttcagtgaaagcagtaacagtcttctggcatatttctcacctttctttctaccttaaaggttcaaagttcctaagtaatctcagaaacctaaaatagtttattctctatcctcactattggtttttaaaaaacattttgcagcatggaccactgctcatgtacagatgctctccaacttaacaatagggttatgtcccaataaacccattataacttgaaaatatcttaagctgaaaatgcatttaatacaccaataaacccatcataaagttgaacaatcataagccaaattataagtcagagaccatctgtattagcttaagtcttggaatggtttattttttagatgccatttagccacttatattctcttctattttattgtgagaactaattcccctcttacattctgtgcttgacccatgctatacttagtgtgaacaagagccaccttcttctcatgacttctatttttttgtgaaaatttccttcactcattcacgacatttggatttgaaatcttacctacttaagtactttaaaaaatcattttctaccatctttcttatcaggagcctctagtgattccttctccacacttctaacttctcatcttcacactccttgtcttcctaacttcactacagtaagtgttttacatgtttagaactcagctcctttactatgattgctaaccatgtaccttaaataaaccgtcttctagttttttgtttcttactctcaattataccttttagaaaagaattaagagtagaaaaagactgctacatagacattcttatgatcttcagaaatgagcacagatcatgcttaatgaaaaaagatttccaaataatgctgcatatgtccagagaaaaggtggcagaaatgactgtcgtttgggggcactattgtctggacatggccagttctcagaactccagtccctaaattcccttctaactaaaggaaaagcctcttaagggtcttatagaaatcctgccactttcacctgaaagaataatcttcagttatgtggcacatggccaagagtaaaagtctttagtcacttggaagcagacagacactgtaatgctaaataattggacataacatggaacttactgaggcctcaaatatcaattttactttgggaaaaagagcagcaactttaaaagtgattgaaagtaactcaagtttattccttaacagagtgatgcttaatctaacaaaaaacatgttatatgcacactcttctccattaccttgtaagaaaactggactaggaaacacagctgaaatggccagttctgcctccatttcctaaaccgtgttataattatgtctatgtgaccagtaacagacaatgaccatgatttatactttttcatatgtttgttgttttgttttcaatgtttgtggtctttcctcagtatcagctaagaggccattaacacagatatctatttatggacatgcgagactgttgttcacctcttttgcagaattcataaagaaatgatggggaaaacacatcaaagatagagtggataaagcaaatgtgccacatatacaccatggaatactatgcagccatgaaaaagaatgagttcatgtcctttgcagggacatggatgaagctggaaaccatcattctcagcaaaataacacaggaacagaaaaccaaacactgaattttctcactcataagtgggagttgaacaatgagaacacatggacacaggggcctgttgggggggtggggggcaaggggaggagagcattaggacaaatacctagtgcttgaggagcttaaaacctagatgacgggttgatgggagcagaaaaccaccacggcacatgtatacctatgtaacaaacctgcatgttctgcacatgtatcccagaacttaaagtagaataaaataaataagtaaataaggaatgatgggacaaacaagtttctgttattgtctctctactgaccaaagggtggtcagagagtataggatgaagcagatttgtgatatccttgaatagatctgctctttactatgaattctatcatctactcccagcgtatgtgggaaagggaccaacttacttgcctggaatttagtgaaattgttttctagggggaccaagagtttcctctacttgatatgaagttgggtggttgaagatgataggattggcttctgcttccatcagaatcctaaagggcagggtatatggactagttggtattggatcttggaaactgtgatgcattgggaatggtcacactcccagagtttgtggacacaaagaatgttttagtgttccctacacaccagacacgggccatgaaggaatctgaagagcctaccaaaccttgcacaagagaaaagctttacttggaacatcatccaggctcagagaacacaaatatttcatttccagtaagacgtttctggtctttttctcttcctccccttccctgaacctaccctagatgagctatggcctcaaagtgccagtagaacgtaagaaggaaggagaaccacactcattcctgccttcaacaatttacacagggatagaaagagatttatattaaatcaagttgggactttcaattattatatagtaccaaacaatctaattgctgaactaagatatacttgtgcaatttaagggaattgtagaatagcatattaattagaatcaagaaaataattcatgaagtatgctataattcctacccaagcgcaggggaatagcatctctaatgaaattctctaaagaggcaagagcaggcacaatgagtttttgtttgattaaagattccatttagtgcttatccaacctagcaattacatttgtatgcttcagatgtttttaaaaaaataaacaaaagaaagtaccttaaataaagaataggatcaaatagtatttaaacaattgagtaaattaaaaaattatatgaattagattgattgaaattgatactttcctaattctcctccttcaacacacagacacacacacacacacacacacacacacacacgtatgcatacaaacacatctgaattctataaaatcattctgaccttgatgagattccatagtttactcatgcaacagaacataatgtctaaatgaagtttctggtctctgttttacatggatgattgagtaaaatcattccctattcctggaagaatagctaagaaaggattcacaggtgaggacatgcgttttttcagaagatgagaacaaagatgagaagatgagagcaacagaatgtcctatatcctaatgctctgtgctgacttcggagtggccaatatgatagagatggaaggaactctgaaaacaaattgccagaatttctaaggaacaggagatgttgagtgagtgaatcaagccatggactggctgtatgggggcagctattagagacaactacccttagacttctttggtgattggtcaagctaatcttttccttcagagtctctcaattataagacttagcttgtgccatttagaacagacaagaacacagagaattatagaacaatctgactacaggttcttaagttatagcaatgaaacttgtagttggccggcaggaaaatattctgagatgtggattcaaagtttctaagtgtgcacacgtacacacacacacccctacctgcatgcgttttctaatttacaaagactactcaagtaaagaggggtaatttcacaccccaggaggtctgtataaagataactctggtctttaaagcatcgggtttcaggtagaggtgaagagagaatgaatcaaactcaaactgccatcctcccaggttaaagatgagtccagtcattgtggagccctctattaacacaggacatgctaggaaggcccattaacccactgccctagcacatttgttaacgtcctagtgcatttgttgatatcaacagttcacagtttttattctgatagggatctattccagcagaccagcttctgtgacctctcaggatgcgaaaaagtaacacaagaaaagcttcttatgtagtgaattgagaaggaaatacctagatcaatattccctcagcacctctggtaggaagtccttagtaggagaaaaacaccatgaagacccttagtgcagaaggaaaagggggtagggggtggtggaagggaagctaaaagaaggggctggaggttctcagaattcaaaccacacaaacaaatgaagtattgaggtcccagacttgatctgggcccagtgtgaaagccctaacttatttctccagaagaatatgtcctctggttttagacttggcactgtggggagaaccagagtgatctatggtggatatacacacaaacatagacacacatatttgcatttagtaatttttgtaaaatttccatttgcttctctgatcctgtctgtatctttgggaatagatgtaagaatattacatctctcaggcttgctctgccccaggtttctgaacgtggaatacatttctccagggaaactcagtattatgagatttgggaggtggaagttaggccacagccatctcagggacaggtttcacagacatgagttttggcagcagccttgtgttctaaagacatttactcctaggggctctagaggatctgcaacatcagcagaggcttcctgtgggttcctgatcttttaaaattagggttctgcagtgacttctgctcctccagaccccctaacagttttaagggctaattccctgtaatatattcagttctgcttagactgattacagggattcctatttcttgactgaattctcatggctatagtggctcgtcaccatttgacatcaccaagaagtcctcattcaggtgcctttggaaattccctcaaacacacaggaaattagagtttgaaagaaaacggagaaccatgagcactgtccaaataggaacttctctcctatcacagagaaagggaactgaaagtcatttctcaagtctcccaaatttagtaatctcacaagaagaaccaatcagtgttctaggactaaacagtgtcataagttgctgagcaacaacttggattgaagatgctattataatatatgaaatgtctttgaatttaccatgtttttctcaagcaccatttaagaacaaggcattatggcagccagcaaagggcagacatagaaaattatacatggttttgcctctaaaagaggagatgacaagcttaaatcataggatcagactcttagcacagactgataccataggctctcatctggcccattctcctgactctttacctttcaggaaaggtattcctgaaaaattgcaggagagaccatgctgtaggtctctttctagcgatctaggagttaatgccacagtgtgttcaaagccctttgatgcgatcagataatcagtaatgtatggaatatttgtgttcataacttgtgagaacggctgcatggcaggacaagaccccagcacaacagtatggaaaatccaccctaagcagacatgtcatgactgatgttgaacaatggactcaccagccaggcacggtggctcatgcctgtaatcccagcactttgggaggcagaagcaggcagatcacgaggtcaggagatcaaaaccatcctggttaacatggtgcaaccccgtctctactgaaaatacaaaaaaaaaaaaaaaaaaattggccgggcatggtggcgggtgcctgtagtcctagctactcgggaggctgaggcaggagaatggcgtgaacccaggaggcagagctttcagtgagccgagatcgtgccactgcactccagcctgggcgacagagcaagacttccgtctcgaaaacaaaacaacaacaaaaaaaacaatggattcaccatccgatgggctccctcactgccaggtcactcttcatggaagtatttgtattccagtcctttctgtggaaagaacttaacattctccttttcataacactgtatcttcagaaacaagagagtcgaagtctcctaattttcaggagtgtctatgttgaacatcaaaatatattctttagagcagatctttaataatcatatgacaagagaaaaactttcataatcttatgacatgagggaaggaatattaaagccgttctgtgggttattatctctaacgttcccaatagaataggctttgccagctgggtgcggtggctcatgcctgtaatcccagcactttgagaggccaaggcgggcaaatcacgaggtcaggagtctgagaccagcctgaccaacatggtgaaaccccgtctctactaaaaatacaaaaattagccgggcatggtggtgggcgcctgtaatcccagctactcaggaggctgaggcaggagaatcgcttgaacccgggaggcggagattacaatgagctgagatcacgccaccaactccagcttgggcgacagagcaagactctgtctaaaaaaaaaaaaaaaaaaaaaaaaaaaaaaaaaaaaaaaaaaataggctttgcccattatactctctcatattcattgacctgaatcctcaaatgaggtgtgtccattagtcaactccaatctcttgtcatatataagatggtagagatgagaagaaggtagctcctttacagcccactatttccactaactactacctgtgtttcaagatacagcctttcatccttctccagtgttgagagtgttgaacctcagagtttctcctctcattttctctaaatgagatacaatgccagccatcccaagctcttggcctgagttgttcatcttgaagtctaggactccaagaagcatgaaagagcttctttagtgaagctatgtcctcagtactgccaaaattcagacaatctccatggcctgacaatttaccttctatttgggtaatttattgtcccttacgcaaactctccagctgtcatggcacagacatatgatctgtatttagctctcactttaggtgtttccattgattctattctcactaatgtgcttcaggtatatccctgtctagaactcagattggggttaaagagtctgtccgtcattgaccaacagtcttaaatacttgatttgttgtcgttgttgtcctgtttgtttaagaactttacttctttatccaatgaacggagtatcttgtgtcctggaccctttgcaagaacccttcccctagcaacagatgcgtcatctcaaaatatttttctgattggccaaagagtaattgatttgcattttaatggtcagactctattacaccccacattctcttttcttttattcttgtctgttctgcctcactcccgagctctactgactcccaacagagcgcccaagaagaaaatggccataagtggagtccctgtgctaggatttttcatcatagctgtgctgatgagcgctcaggaatcatgggctatcaaaggtaggtgctgagggaatgaaatctgggacgatagactacgaagcattggagaaaagacctatggacatttggaagataatgtgtggagtgaaagaatagtgtgacaggtattatgtggtctcgacagaaagtataacaaattgtggtttggtggagttcttccctcaccacaaactgaagtaagtcaaatttggtttagaggatcaaaactgagttgtgtattgatgaatagcaaggtcctgctacaagccaaactgggggtgggggtgggggtgggggaggaagaatattttctggcaagcattaacaagttatatttctgggctttaattattctttctggaaaattagtaaaattaaaaactaaaaaccacacatagttttgctagaattaaatgaaaaaaaaagttattagccctgttcttatctgaatacatgatacagtagttattttttggagtgtaaatcctgtcggtatatattgagcacatatattgtgttgaagattactagaaggaaaagtcatcaaaaagcaacaatttaccccaggaaaaggggagggaaggcatgctgatatgagttgcctcatgggacagtgatagccattccctgccttcccatctccatggtacagcagatcttatatcatgttaacttagtaatatttccaagagagtagaaaaatgagtaaggaaatggggaatctgatattattctctctcatctccagagcaacattggtgctgttgtaaagatgtactgtagaaaagtattcttcacccagcatgacccccacagaaggtgtcaggtagacttgaaataagcaaagtaataacccagctcccatacccatagtggcaattgtagatttctattgccccaaaagagccatacatagggatacttacctagaaagacagaggctcttcccttggtttgtgaagaggcagctagtatatttgtgtgtgtttgcatagatgcaaacggtaaataaattcctaggtttatcaatacacagtcaaacattaaagtctctcatcttggctgggcacggtggctcacgcctgtaatcccagcactttgggaggccgaggcaggcggatcacgaggtcaagagatcgagaccgtcctgggcaacatggtgaaaccccgtctctactaaaaatacaaaaaattagctgggtatggtggcacacgcctgtagtcccagctactcgggaggctgaggcaggaggattgcttgagcccaggaggcggaggttgcagtgagctgagatggtgccactgcactccagcctggcgatagagcaagactccgtctcaaacaaccaaaccaaaacaaaacaaaatatctcaccttatctttgaagactaaggaaaaaaaaatctcccactcatcgatacactccacagaggcagcatactctccaagtgtagctttctcttttcatgttcattattcccttggtgttggttattctcaatgtcaatcataacagaacatcttccataataacagtcccaatttaaggagcattaagataaaaggtggaattgccaaggtcaatccagacgagaaccttctcatagaggtaaccaccgtgtgggtttggatgctgggaagcagggggactatgacgctacaaggtctcagtcttaatttttggagtatttcagtccccaggtatattttccatagatttggcccttaaataaaaagaagcttctgactctaaaatgtaaacagtgcttgttacagtcttgttgatatattaagaaattactcaccttatctcatttaatcttaaaaacaaacccctgacaggatcaaaaccacagcagggctacataataggaaaactatacataaataggtagaataatctgctcaggatcactaggtaagttgctgaataagaattcaagatgtttttgatcccagagtttaaaacccaacctttcaaacagcgtttctttcttcttagagtacaatgttctgagaaagagatcctctggaattctggcctaagtgtatttaatgcccgggtaaagaaagtgagagaacatttctctttaggggctgctgctggatttctaaaaagaaaataatttctcagctagtaacatggagccaaacaacagcttcacaagactctgggttctttagccctcatctccttcaatccaccctctttataaccagtccttcttgtttttcccctcccagctttgttcagcagcatgcccttcacccagaccttgtcttgtcactcatccctactcgccatcattctttcattcctcttggcccaatctctctccaccacttcctgcctacatgtatgtaggttattcatttccctctcttgattccccccacccaactctctttctccacttctcgcctttcagaagaacatgtgatcatccaggccgagttctatctgaatcctgaccaatcaggcgagtttatgtttgactttgatggtgatgagattttccatgtggatatggcaaagaaggagacggtctggcggcttgaagaatttggacgatttgccagctttgaggctcaaggtgcattggccaacatagctgtggacaaagccaacctggaaatcatgacaaagcgctccaactatactccgatcaccaatggtacctccctctctgctgcactcctggacatgggaatccatagtttgaaagtagttgcttcagctctttgtgttagattattgtaactgattttccctccaagggcctaaccttgccattaacaagccccaaattctcatgccagaggtctgagaactttatgggtttgatcctatcttgttgtgctcaagtcttgtctctgtcatccatggtctcctacaaagtcattgccctaagttcatgctgggggagccagaagggaagtccttggatatcttatacctcaatattggctcaatttcttggggagggggtgctgtcagagattgttatctgaggatgtgacatagatttctcagggcacaatttcaactactttttcagctttagggtttttagatacgtttgtaccacaattgagcatgggagggagaggggtgagcctaagcagtgatggctgatttctgtcatgtctgtcatgtgtcccccagtacctccagaggtaactgtgctcacgaacagccctgtggaactgagagagcccaacgtcctcatctgtttcatagacaagttcaccccaccagtggtcaatgtcacgtggcttcgaaatggaaaacctgtcaccacaggagtgtcagagacagtcttcctgcccagggaagaccaccttttccgcaagttccactatctccccttcctgccctcaactgaggacgtttacgactgcagggtggagcactggggcttggatgagcctcttctcaagcactggggtatggaccaacactcaatctcctttatttcaaggtttcctcctatgatgcttgtgtgaaacttggtgttctaactgtttcataatatctgctacaattaatataactgtcttctcctactatccagcttccgcctttttttaatctgtaattctctcaatacatcattctgtcttcctcttctttaatctatgaataacttttctctttattaagaaccctacatttgattctgagtgttacttcttcccacactcattaccatgtactctgccttatttccccccagagtttgatgctccaagccctctcccagagactacagagaacgtggtgtgtgccctgggcctgactgtgggtctggtgggcatcattattgggaccatcttcatcatcaagggattgcgcaaaagcaatgcagcagaacgcagggggcctctgtaaggcacatggaggtgagttaggtgtggtcagaggaagacatatatggagatatctgagggaggaaaacagggtggggaaaggaaatgtaatgcatttaagagacaaggtaggaacagatgtggctcttgatttctctttgctagaacgaatcagacattggtatcatctggtatcccaaagcttcagggtctgtcatccctttctatagacgggcaccttgatcacggctccagtcttagaaatcatctccagtacctaaaaccattgtttcacattagaatactgagtctagggatctagaaaatactgagtctagggatctagaaaaataagcctcaagatttgggcacatcctagcttgtatttcctggggcaggtcatcagttcagaagcatttccagatcctggctcctttcaggttagggtcaattcattgcatgaaatgggaatctcttagaggccaatgcctgcttttgcttctttagtctcaaatgtagtatgagaaactctaaaaaaaggtaaagcatggttgcttattatgttcagttggagagtagggtatacagttagttcatgttggaaaggttagatgaacattgaaagaattttgcaaagtcaaaggattaagagagaagaggaaggaatctgaagcaaggagctcaaaactgatcttaaactccttggtaactatgtgtgtcttgctataggtgatggtgtttcttagagagaagatcactgaagaaacttctgctttaatggctttacaaagctggcaatattacaatccttgacctcagtgaaagcagtcatcttcagcattttccagccctatagccaccccaagagtggttatgcctcctcgattgctccatactctaacatctagctggcttccctgtctattgccttttcctgtatctattttcctctatttcctatcattttattatcaccatgcaatgcctctggaataaaacatacaggagtctgtctctgctatggaatgccccatggggcatctcttgtgtacttattgtttaaggtttcctcaaactgtgatttttctgaacacaataaactattttgaagatcttgggtggaatttttggtgtttaagccagttctttgggtggcggtggggggtggggagtcggtcctggggaatatatgtgatcctttcccggtaaaatatctgaatgttgaatttatcttataaattctagaattcatcagacatatcccggttcatttgggcttggtctcattttgtgcatctgcaggcaaccctcttgttgtggtctagtcctcatcaggaaaacctaaagtggggttggtttgttgggagatctctactgagcaatgatataactctatcttcagtagagtgaatctgaaaccccaaggtatggatctcagaatgcatgggatggaggggagcagatggggttagagtggggagaaggaagacagaagaatccataaacattgcaggatttacatatcaacatcgttcattccagatttaatgagcaaagagattggacactgaagactggccttacccattctgttagacatagtctcagatgcctattttattaccgagagagtagtctgactgattcttgaaaccaccttatatttgaagatgtgtctttgagtggaaaagctgagtgaaatttggggttggggagaaagatatgacattaagatgagaggaaggaatatttgaaacacgatgaactgttgctcatttgtctataaaactatgacttgatatttatctctaaaatagtttctagaacctgccataaaccactaagataaactattcatgatagtgtggtagactgcaaataaatgctgttgaaatgagttaggcttgggtttcatcttggctgtatcatttactagctatgttttcactggtatcttacttaacttagcctcacattactcatgaaaatactggtgttaatttttactacattgaattaatatcagaattaaaaggaaaacgcaagcaaagtaattagatacatgcttagtgataataaaatattgcaaaaaattatacattctgttgtttttctcaaaatttctatagagtgatgataaaaatctaagagaagctaaacaaaacaaggataaaccaaagcatcatgaccttctaagccttactaataaataagaagtttctcggctgggcacggtggctcacgcctgtaatccagcactttgggaggccgaggtgggcggatcacaaggtcaggaaatcaagaccatcctggccaacatggtgaaaccccatctctactaaaaatacaaaaattagccaggcgtggtgataggcgcctgtaatcccagctactctggaggttgaggcaggagaatctcttgaatccgggaggcagaggttgcagtgagccgagatcgcaccactgcgctcctgcctggcaacagactgagactccgtctcaaaaaaaaaaaaaaaaaaaaaaaaaagtttctctactgttggttcagagaatcaaagcagaatcttgagactactgacggtagaataggtatgaatgtctttcttacatgactacaaactttattataaaataaatagcttaacacagagaatacactaaaacttagacaagcatggattaagaaagcaaaaagtaaacccatatactaccatgtaagaaaaccatttttggccaggcgtggtggctcacgcctgtaatcccagcactttgggaggccgaggcgggcggatcacgaggtcaggagatcgagaccatcctggctaacatggtgaaaccccgtctctactaaaaaaaaaaaaaaaaattagccgggtgtggtggcgggtgcctgtagtcccagctactcgagaagttgaggcaggaaaatggcgtgaacccaagaggcagagcttgcagtaagccgagatcgcaccactgcactccagcctgggcgacagagcgagactccatctcaaaaaaaagaaaaaaaaaaaaaaaaaaaaaggaaaaccattttaatagacttttatttttagagctgttttaagctaacagaaaaattgcagaaattgtatacagagctcccccacccccagtttctacaatgcttaacatcctgtattaatgtggtacacttgttacaattgatgaaccaatactaataattattattaactaaaattcatagttatacgagggttcactctgtattacacagttatatgggttctgacaaatacataatatcatatatccaccattacaggattaaacaaaatagcttcactgatctaaaaatgacccaggctccatctactcatccttccttcctccctctgaaccattggcattctctgagctatttactagtgttttgcctttttcagaatgtcacatacttgtaatcatacagcatagagctttttcagatgagattcttttgcttagccatatgcatacaggtttcctgcgtatattgtcatagcttgatagcttatttttctttaatgttaaataatactccattgtataaatgtactatggtttatttacccattaatctattgaaggacatcttggttgcttctaatttttggcaattatgaataaagctgctataaacatccatgaacagatgtttgtgcagacacaagttttccactttggataaatacatagaagggcagttgctggatcatatggtaagagtatgtttagctttgtaagaaacaactagaatatcttccaaaatggctgtatcattttgcattcctaccagcaacgaatgagagtccctgttgttctatatccttgccagcatttggtattctggggtttgggatttcagcaagaaagccattttaatatttttttattttaaaataattatagattcaggggaaattgcaaagacagtatagagacattctgcatacgccttcacccagtttctccaaatgtttatattttaagtaattatagcacagtagcaaaaccaagaaaataccttgatacaatgtgtatgtatagttttatgcatgtcttaccacatttgtagattcatgtaaccaccaccacaatcaagcacagagctattccatatcacagagatcttcatcatgcttccctttatagccaaattccccccacacaatcaccttaacaacttaaaaccactaatttctttgctattaatctctagaatagtgtcattttgaaaatactagttaaatggaatcatgcagtatgtgactggtgtttttcacttagcataatacccatgagatccatccaagctgctgcatatatcaacaatctttttttttttattgctaagtagtattccatggtctaaatgcagcacagtttgcttaactatttgcctattgaaggacattttggctgtttctagtttggggtcactataaataaggctgttttgaacatgtgtttaaggtttttctatgagcatgagttcatgagttttcatttctctggtataaatgtctgggatataattcatgggcatatggaaatatatgtttagtttttcaagaaactgccaaacttagccaagtatgatggcttatacctgtaatcccagcactttgggaggccaaggaggaaggataaattgaggccaggaatttgaggccagccccagcgtctacacttttttttttttttgagacagagtctcgctctgttgccagactggagtgccatgatgcgatctcggctcactgcaacctccgcctcccaggttcaagcaattcttctgcctcagcctctcgagtagctgagactacaggtgcacaccaccacgcccaattaatttttgtatttttagtagagacagggtttcaccatgttggccaggatggtcttgacctcatgacctcgtgatccgcttgccttggcctcccaaagtgctgagattacaggcatgagccaccgtgcccggccaaatgttttgttttgtttttgttttttgtttttttgtcaggtggatgaggtggcatgcccctatagtcacagctacttgggaggctgaggtgggaggattgcttgagcccaggaattcgaggctgcagtgagccactgcacttcagcctatctgacagagcaagatcctgtctccaaaaggaaggaagggagggaagaagcaaggaaggaaggaaggaaggaaggaaggaaggaaggaaggagaaaaaagaaggtagggagggaggaaggaagggagggagggaggaaaaaagaaagaagaaaggaagttaaaaagaagggagggagggaggaaggaagaaaggaaagatggaagaaaggaaggaagggagggaggagaaagagaaagaaaaagaaggaaggaagaagggaaggagggagggaagggaggaagggagggagggtgaaaggaaggaaagaaggaaggaaggagaaagaaaaggaagagagaaagagaaagaaaaaagaaagaagaaagaaagaagaaagaaagagagagaaggaaaggaaagaaggaaggaaaggaaagaaagaaaaagaaaaaggaaggaaggaaagaaggaaggaagaaagaaaaagaaagaaagaaggaaggaaagaaagaaagaaagagaaagaaagaaaccgataaactattctctaattgctttgtgggagtatggccactttcatcatattgatttttcctttttttttttttttttttttttttgcgatagagtctggctctgtcgcccaggctggagtgcaatggcgtgatttcggctcactgaaacctctgcctcctgggttcaggtgattctcctgcctcagcctccctagtagctgggattacaggtgcacaccatcacgcctggataatttttttgtatttttactagagatggggtttcaccatgttggccaggttggtctcaaattcctgacctcaggtgattcgcctgccttggcctccggaagtgctaggattacagatgtgagccaccgcgcccagacaatattgattcttccttttccatgaacatgatatttttttccatttatttgtgtcatctctgagttctttgagcagtggtttgtagttttccttgtagagatctttctcctccctagttagctgtattcctaggtatttcgtgtgtgtgtggcaatcgtgaatgggattacgttcctgatttggctctcagcttgactgttgtggtgtataggaatgttagtaatttttccacattaattttgaatgccaagacttcgctgaagttgttaattagcttaaagagcttttgggctgagactatggggttttcttgatataggatcatgccatctgcaaataggcatagttcaatttcctctcttcctgtttggatgcctttaattctttttcttgcgtgttgccctggccaagacttccaatactatgttggataggagtagtgagagagggtatccttgtcttgcgctggttttcaaggggaatgcttctagctttttcccatttagtatggtattagctgtggggttgtcacagaaggctcttattattttaagttatgttcacttactactcagtttattaagagtttttaaatgaagggatattgaattttatcaaaaaccattcctgcatctattgagctaatcatgtggcttctgtctttagtactgcttatgtaatgaatcaaatttattgatttgcatatgttgaactaaccttgcatcaccaagataaagcatacttgatcattgtagattagctttttaatgtactgctggattcagtttgccagtattttgtggaggatttttgcataaatcttcatcaataatatttgcctgaagttttcttttgtgtgtgtgtctgccaggttttggtgctgatcctgatgatgctggcctcatagaatgagttagagaggtatccctcttcctcaattttttggactaattataacaggaatggtaccagctcttctttgtacatcaggcagaattcagctgtgaattattctagtcctaggggttttttttgtttggtagtctacttattactgatttaatttctgagatcattatcagtctgttcagggattgaatttcttcctggttctgtcttgggagggtgtacgtgtccagaaatttatcaatttcttctagttttcctagtttatgtgcatagaggtgtttttaatattctctgatggttatttgtgtttctgtggggtcagtggtaatatccccattgtaatttctgagtgtgattatttgaatcttctctcttttcttctttattagtctaactagaggtcttttttttttattaatttttttttaggaaaccaattcctggactcattgatcttttgagtgttgtttttttttctgtctcaatctcctttagttcagctctgattttggttatttcttgtcttctgctagccttgatattggtttgtacctggttgaccagttcttttagttgtgatgttaggttgttaaattgaggtctttctttttcatgtgggcatttgatgcataaatttcccacttaacactgccttagctgtgtcccagagattctggtatgttgtatcgttgttctcatcagttttaaagaacttctcaatttcttccttaatttcattatttacacaaaagtcattcaggagcaggcggttcaacttccatgtaattgtagggttttgaatgaatttcttagtcttaatttctaatttgattgcactgttgtctgaaagattgttttttatgatttcagttcttgtgcatttgctgaggagtatttgacttccgattatgtgatcaattttagagtacatgccatgtggtgatgagaagaatgtgtatactgttgttttggtgtggataattctatagatgtctatcaggtccatttgattcagtgctgagttcaagtcctgaatatctttgttaattttttgtctcgatgatctgtctaatattatcagtgagttgttaacatctccaagtattattgtgttggagtctaagtctctttgaaggtccctaagaacttgctttatgaatctgggtgttcctgtgttgggtgctgatctggtttggctgtgttcccattcaaatctcaccttgaattgtagctcccacaattctcacatgccacgggaggcacctggtgggaggtaattgaatcatgggtgcgggtctttcccatgctattctcatcatagtgaataagtctcatgagatctgatagttttataaagaggagtttccctgcacaagttctcttgtcttgtctgccaccatgtgagatgtgattttcaccttccatcatgattgtgaggcatccctagccatgtggaactgtcagtcaattaaatttctttcttttgtaaattgcccagtctcaggtacatctttgtcagcagcataacagactaatagaggagagtggagcactgctgaaaagatatctgaaaatgtggaagtgactttggaactgggtaacaggcagaggttgaaacagtttggagggctcagaagaagataggaaaatgtgggaaattttggaacttcctagagacttgttgaatgcctttgcccaaaatgctgatggtgatgtggacaataatgtccaggctaaggtagtctcagatggaaatgaggaacttgttgggaactggagcaaaggtgactcattatgctttagcaaagagactggtggcattttgtccctgtcctagagacttgtggaactttgaacttgagagagatgatttagggtatctggcagaagatatttctaagcagcaaagcattcaagaggttacttgcgtgctgttaaagccattcagttttataagggaagcagagcataaatgtttggaaaatttgcagcctgacaatgcaatagaaaagaaaatccaattttctgaggataaattcaagctggctgcagaaatttcatgggtaacgaggagctgaatgttaattattaagacaatggggaaaatgtctccaaggcatgtcagaggtgttttttttttttttccagagtctcgctctgtcgcccaggctggagtgcagtggtatgatctcagctcactgcaagctctgcctgccaggttcatgccattctcctgcctcagccttccaagtagctgggactacaggcatccgccaccacacctggctaattttttgtatttttagtagagacggggtttcaccatgttagccaggatagtctcgatctcctgacctcatgatccacccacctcggcctcccaaagtgctgggattacaggtgtgagccaccatgcctggccatgtcagaggtcttgatggcagccctgcccatcacaggcctggaggcctaggaggaaagaatggtttcttgggctgggcccagtgtccccgtgctgtatgcggtctttggacttggtgccctgtgtctcagccgctccagctgtgactaaaaggggccaacatagagctcaggccacgacttcagaggatgcaagccccaagccttggcagcttccatgtggtgttgagcctacgtgtacacagaagtcaagagttgaggtttgggaacctccacctagatttcagaggatgtatggaaatgcctggatgtccaggcagaagtttgctgcctgggcagggcactcatgtggaacctctgctagggcagtgcagaaaggaaatgtggagtgggcaccctcacacagagttctcaatggggcagtgcctagtggagttttgaaaagaggaacaccatcctccagactccagagtgatggatccactgacagcttgcatcatgcactggaaaagctgcagacactcaatgccagcccatgaaagcagcttggagggaggctatatcctgcaaagccacaggggcggagctgctcaagaccaggggaacccacctcttgtatcagtgtgacctggatgtgagatatggaatcaaaggaggtcattttttggagtttaagatttaagtgctctgctggatttcagagttgcatggagcctttaagtcccttcattttggccagtttcttccatttggaatgggtacatttattcaatgcctgtaccctcattgtgtctaagaagtaactagcttgcttttgattttacaggctcataggcagaagggacttgccttgtctcagatgagaatttggactgtggattttgagttaatgtagaaataagactttggggtactcttgagaaggcatgattggtttgaaatatgagggcatgagatttgggaggggccggtggtggaatgatatggtttggccctgtccccacccaaatctcaccttgaattgtaggtcccataatacccacatgttgtgggagggacctggtgggaggtaatttaatcatggggtaggtctttcccatactattcttgtgatagtgaataagtctcatgagatttgatggttttatgaaggggagtttccctgcacaagtcctcttctcttgtctgctgccatgtgagatgtgcttttcaccttccaccatgattgtgaggcctccccagccatgtggaactgcgagtccattaaacctccttcttttgtaaattgcccaatctcaagtatgcctttattagcagcatgataatggactaatataaatgaatatatatttaagaaatggataaattcctggacacatacaccctctcaagactgaaccaggaagaaactgaattcctaaacagaccaataatgagttctgaaattgagtcagtaataaaaagcctaccaaccaaaaaaagcctgggaccagatggattcacagctgaattctaccagatggataaagaagacctggtcctattcctattaaaattattccaaaaaaattgaggagaagggattactccccaattcattctgaggccagcatcatcctgataccaaaatcgggcagaaacaacaaaaaaagaaaatttcaggccaatattcttgatgaacatagatgcaaatatccttaacaaaatactaacaaaccaaatcaagcagcacatcaaaagctaatgtaccacgatcaagtagattttacccctgagatgcaaggttagttcaacatatacaaatcaacaaatgtgatccatcacataaagcagaatgaaaggcaacaaccacctgatcatctcaatagatgtggaaaaggcttttgataaaattcaacagcacttcatgttaaaaatgctcagttcacgcctgtaatcccagcactttgggaggctgaggtgggcagatcacaaggtcaggagattgagaccatcctggccaacatggtgaaaccttgtctctactaaaaatgaaaacttagctgggcatggtggcatgcgcctgtagtcgcagctactcaggaggctgaagcaggagaatcgcttgaacccagaaggcggaggttgcagtgagccaagatcccaccactgcactccagcctgacaacagagaaagactccatcttaaaaaaaaaaaaaaacctcagtaaactaggcattggaggaacatacttcaaaataataagagccatcaatgacaaacccacagccaacaacatagtgaatgggcaaaagctggaagcatcgctcttgaaaatcagcaggagacaaggatgccctctctcaccactgtttttttttttttttggagacagagtcttgctctgttgccaggctggagtagtgcagtggcgcgatctcagctcactgcaatctcgcttcccaggttgaagcaattctcctgcctcagcctcccaagtagctgggactacaggcacatgccaccacgcctggcctttttttttttttttttttttttttttagtagagaccaggtttcatcatgttagccaggatggtgttgatatcctcacctcgtgatccacccacctcagcctcctaaagcactgggattacaggtgtaagccactgtgcccggccctccctcaccattcttattcaagatagtattggaagtcctgaccagaacatcaggccagagaaagaaataaagggcattcaaagaggaagagtggaagtcaaactatccctgtttgcagatgatatgatcctgtgtctagaaaaccctaaatctccaaatcttggcccaaaagttcctttagctgataaacaacttcagcaaagtttcaggataaaaaaaatcaacatataaaaatcagcagcattcctatacacaaagaacactcaagctgagacccatatcaagaacataatcccactcacaatttccacacacacacatattacctaagaatacagctaactatggagatgaaagatctctacaagaagaactacaaaacactgctcagagaaatcagagatgacacaaacaaatggaaaaaattatcatgctcatggataggaagactcaatatcattaaaatggccatactgcccaaagtaatttatagattcaatgctattcccattaaactaccattgacagtcttcacagaactagaacaaactactttaaaattcatatggaagcaaaacagagcctaaatagctaaggcaatcctaagcaaaagaataaagtaagaggtactatgttgctcaacttcaaactatactatgaggccacagtaaccaaaacagcatggtactggtacaaaagcagacacacagacaaatggaacagaatagagagtccagaaataatgctgtacaactccaaccatctgatctttgacaaagatgacaaaaacaagcaatgaggaaaggactcctcattcaataaacagtgctgtactaactggctagccatacgcagaagactgaagctggactcctaccttacaccatatacaaaaatcaacttaaaatgaattaatgacttaaatgtaaaaccaaaaatcataaaaaccctggaaagtaacctagaatataccattctgaacataggacttggcaaagatttcatggcaaagacaccaaaagcaatcacaacaaaaacaaaaattgacaaatgggacctaatttaacttaagagcttctgtgcagtaaaagaaactatcgacagagtaaatagaaaacctagagaatggagaaaatgttaagtcctaattcgggaaaaggagtcaggctggtgggaccagaagaaagcaaagaggtaaaacaaataagctgtaagtctgtctttcctcatggtccagaacacacagccttcctgtgcaaataactcacagtcttcccgtgcccaactatcatcagacatctataagctagctcactgcaaccctggcattgttgctactgcacatagcactctgcagcctaagaaccatcctataaaatctcctgcaagcccttgtttccgtgcagtcagcttctcttctgctggcctgcctgcctgttgcctccttgcaacatattttcctactttctctaataaatctgcttttttttctacctacaactgtcttggtaaattcttttaccctggcgccactggcccagatagttattgctcacctgcaacagaaaatatttgcaaactatgcatctgacaaaggtctaatatccagaatctataaggaacttaaacaaatttacaagaaaaaaaccaaaccacctcattaaaatatgggcatgaacagacatgaacagacacttttcaaaagaagacatacatgcagccaacaaacataggaaaaaattcgcaacagcactaattattagagatatgcaagtcaaaatcacaataagataccatctcataccagtgtgaatggctactattaaaaagtcaaaaaataacagatgctggtgaggttgcagggaaagagaatgcttatacactgctaatagaaatgtaaattagttcagccattgtggaaagcagtggggtgcaaagaactaaaaagaaaattaccatttgattcagcaatcccattactgtgtatatacctaaaggaatataaaccattctaccataaagacacatgcacacatatgttcactgcagcactgttcacaatagcaaagacattgaatcaacctagatgcccatcaacagtggactggttaaaggaaacgtggtacatatacaccatggaatactatgcagccataaaaagaatgagattgtgtccagaattggttccttccggtgggttcttggtctcgctgacttcaaaaatgaagccatgaacccttgtggtgagtgttacagttcttaaagatggtgtgtccggagtttgttccttcagatgttcaaatgtatcccaagtttcttccttctggtgggttcgtggtcttgctgatttcaggagtgaagccgcagacctttgctgtgagtgttacagctcttaaaggtggtgcatctggagttgttcattcctcccagtgggtttgtggtctcgctgacatcaggagtgaagctgcagactttcacagtgagtgttacagctcttaaaggtggtgcgtcctgagttgttcgttccccctggtgggtttgttgtcttgctggcttcaggagtgaagctgcagaccttagcagtgagtgttacagctcataaaggtagtgcggacccaaagagtgagcagcagcaagatttattgcaaagagtgaaaggacaaagcttccacagtgtggaaggggacctgagtgggttgcagctgctggctgggttggccagcttttattcccttatttggccctgtccacatcctgctgattggtccattttacagagtgctgattggcacgtttacaaacttttagctagacacagagcactgattggggcatttctacagagtgctgattggtgcatttacaaacctttagctagatgcagagtgctgattggtgtgttttcacagagtgctgattggtgcttttacaatcctttagctagacagaaaagttctccaagtccctgcccaacccagaagcccagccagcgtcacctctcaagatcatgtcctttgcaggaacatggatggagctggaggccattatcttatgcaaactaacatagggacaaaaaaccaaataccacatgttctcacttataagtgggaactaaacattgagtacacatggatacaaagaagagaacagtagatatggggacctacttgagggtgaaggataggaggagggaaaggatcaggaaaaatacctgtgagatactatgcttattaccttggtgatgaaattatctgtacatcaaacacctgacatgcagtttacctatagagcaaacctgtacatgtatccctaaaactaaaataaaagtttaaaataaaaaagaaagaaattagttcaatacttttttctcagtgaaatgcttatgcaaacaaatatcatacacttttatttcagagatttcgggatcataaagggagtgtaccaaggacagtttgtgactagcctcctcacattatccctcacattatcatttctcatctcttctcccctaaactttcatgccaacagcagactaggtaagtttccctttcctgcatctctaatgattcagggcgattaaggtctccttctccagccccctgcaccaccattcccacccccatctcatctcatctctgcccagaaggctggaaggacaagctgaagctccctcctgtgttccctcccacagcagacacacagacaaatccccactctacactcacctacctgagccctcctaattccttctggctcacaatcctacaccctcccacagggtgcttacgtgtgcatacacacacactccctgttctcagggaccctactcccctcccccacccgccttgctcacctcgcctgtgcatggagaagctctcaaaaaccccgtagttgtgtctgcagtaggtgtccaacagaccccgcaagcagcccaagaggttcttctggctgtttgcattcctggactcttctccgctccagctccgccaccgcccggaactttccgacgtccctatggaagcgcgcatactccttccggtgtggatgagtctctgcacaaaccgcatccgctctgtcccattgcagaaatagcactcgtgtttaatctgctccaagaaatgtgccgcagggacatgaagaaccggtttcttgggcggcatcctaggaaaagagtgatggctatgcccacaatcagcagggcgaggggcggaacaccttgactggcccccaccagccacccccgaccacctaggggttcctcttccatctgcctgaggcggagggaggctgcgaggggcgtggaataccatttgggatccgctacccatttccgagctgagctggacgcctctttgcaaggctctggatcaggatcaccttcctcatcactgtctcctgcgcttcctcctcctgggagcctccatccaaaagacacttctgctccctcctatcatgccacactctactcattccttaaacaagacccactgcctccattctgtaaatgcttccttagtgcttaccttgtgtctcatctgtgctgtctcctgggaatccaaacgggaaaaatagacctcatccctccgctggaggagcttaaagagaagtgaaattgatggcaaaaaaccaaacacgcaacaccttatacaggaacgaaaaatgttaagagaagtgtggagttctagaagaaagaataggatgatctaaattacattagggtgccagagaaggactctgagagtgacagctcaaatgtgaccttacaggtttagtgggtgtgagccagggggcagagtggagcccgtgtgtgtctctggacaaaaagggaggcacatttcaggtaagcataatatcatgtacaaaagcttgaaagaattgatgaacttcttcaagaaaccagaaaaaagttcactaaagcacagcatgaaggaaaggaggggaaaagattaaactggagaaatcacaagaagggaacaattaaaatcattgtcatgttaggatttcgatttatactaaatgtaatgggaaacagttgaagagtccatgaccccaacacaggttcacaaacttttttttttggactttctaaatccagaaaactcacgaattcacttgctgctgtttttaatttgttgccgaaactcatttggcaaatctgatctgaagaggtaaggactcaaaagtgtcacagagctcttactggtgacatgtgcatctgtagtttcaatatatataaacatacaaacatacgtatgcatgtgtaaatatacacagatttcaaatactgtgcatgtatatatttttgatgtttttgtatttatgtttaaatgaactatgaaaaatcaaaaataaagaaaaatccttgtgtttaataaaatgagatgaatagaaagcatttttaaaataataatttttttttttaagttctgggtacatgtgcaggatgtacaggtttgttacataggtaaacatgtgccatggtggtttgctgcagctatcaacccattacctaggtattaagcccagcacgcattagctcttttccctaatgttctccccaactctgccctcccccagcagaccccagtaagtgttgttctcctccctgtgtccatgtgttctcattgtttagctcccatttatatgtgagaacatgcggtgtttggtttcctgtttctgtgttaatttgctgaggataatggcttccagcttcatccatgtctctgcaaaggacatgatctcattcctctttatggctgcatagtattccgtggtgtatatgtaccacagtgaatagaaagcatcttacattatcagtagtataaaatgtagaattactgcagaaatctgaggcattttactgaaaaatatttgggatagtcgtcaccatttatgacttataattaccagttgttgaaagttaatagaggtaataattatcaagaacacatcaaaattttgaaataaactgcataaagcaaaaaagtaaaaatgaagatcttgaacctgcattgattgaatggattcatcaagaaagcagtgaatttatgcaactgtctaggtttttttttttcggcaatgaaacaagcaaaactaagccatgaagagctgaactaagagataaatgtgttttaaaagtgtgagtatagaatttttagaagaaacacaatgtaaaccagtgttctcagccttggcactattgacattttggactagataatattttcttggtgagaggagctgtctactagggtccctagcttctacttgttacatgtcagaagaaactcctggtgtgacaaccaaaaatggctccagacattgccaaatgttccctagggagttgggagagggaagggagggacagaggggtggtgaactatccctgggtgagacccactagtgtaaccatctgaaacatctatggttaaaaagccgctattaattatggaatatttgagatttacactgaaaactctgccaatattctatctatttaaaatcttggtcctacataaaacttaggatttttaggaatctggtcccagtgcagagctatttttctagcaaaattaattcattcagaaccaaggtttactgatttatttgccttgccagtcgccaagtcatattcttaatttctgtgtcactggtccactactcactgcctcagctaattcattttctaactttcagtttcctactcccaacaatacaaggaggcatcaaattaccaaccttggacagaggcagaactcttatttctgtagttaagccttctcagaaggggagtgctatggtttggctgcgtaagcatttcaatcttgtcttgaattgtagctcccacaattcccaagtgttgtgggagggaccaggtgggagatagttgagtcatgggggcaggtctttccccatgctgttctcatgacagtgaataagtcttatgagatctgatggttttataaagggaaaaacccttttgcttgctgtcattcttctcttgtctgccatcatgtgagacatgcctttcaccttccgctgtgattgtgaggtctccccagccacgtggaactgtgagtctattatagccctttttccttataaattatccagtcttgagtatgtctttatccgcagcctgaaaacagactaatacagggagaaactaagaagatggcattctctcatagatagtttccaaaaaacgagcaagtccccagattttgagtagagactttcacaagctcccttcacccttcagaaatgatagcagagaggagagcactttggatgagataaggtctatcttattattcctaaattctctgagcaccttcttcacagataagaatgttggaaaataaaaatatgtgaagttgctgtcactgtagcttgcatggttagcactgcagtctatgctcatgtgccaagcttagattgccatatttagcaaataaaaatagagggtgcctagttaaatttggatttcaaatacattattgttgtttatctgaagttcggatttaactgggtatcctgtactatatttggcaacctgagcccaacttgctaataatgctcagaaggagtgaatttaatacttctttgtgttctttaacacatgcctatgacagcgtgcacatagggaagttttcaaatgataaatgcaaaatgaatgaaagtttctcctttacattgggactagcagaccttgcatctctctcccaccctgagacacaccctgtacataagaaattctatcaataattcagactcagtctagtcactattcactaatggtggttgtaagctcaggctctagaatcaggaaatctgaatttaaacatgaccccttctactagggttaattttaacaaccattaacctttaaaaatatatataaaatggatccaacagtaatatattcctcacaggattattgttgagggtaaaactaagtagtggctcttcttagtgctgataatataataatcactctaatatattaccattttatttttacaatccctataaaggaaagcttcattatttttctattccttaacttctaaagcaagtaacatctagatcatgatttggcaattgtcttttattaatttatcactaattaccattttaaacacatgagggcagaaacactggtttatgtataatagttcatatgcctaaacctcacacaaaaggagagtgctgatgtcaaagagagggaatttgtatatactcagattaaaattgcaatctgatttctagcactaactttgtgacagtgggtaagttacttacaccctttgaattttagattccaaagatgtatatgcttttaaataccaaagatatgataggataggtattagatttccataccaaaatttataagcctggtaattagtcactgcaaaatattacaatactccacgctaatacagaccagatttgctttgtttattactccattctcatcacccagagtaataactagtatattctaagtcactaataaatattggctgtatgaactaatagccttttgcataacctgtcaccactgtacacaggggccttctagtgcttcattgccaatgactgagcatctgtctctggttcgcaggtcatcctgcttctcttcagcttctttgttcattttctttaggtccagctggctccctgatcccagagcatagtctttccctgaggctcgctactcaaaagagtcaaacttcatccagccctcacttcttccacccgctcttcaaatggtccaatctactttccatcctggatactccactgactgcaaatatcaactccttcaaacgcagcacttgcttctctgtcacgttctcacttcactcacctgtcggtggttctcaccacaactggccactccctcacctcgaaaaaatcatttgtctttgattcccatgcatcacattctcttgggtttttttttttctccagcatctctggggaatcttctcagtcccttatgctgtcctgtggccctctgatattttttctacacaaaaatctatctccctctgcaacctcttccacttccctggaatttaacacagaacctgcatcgaccccaacataaatacctccaaccctggcctcaccctgaactcctctcttatattcagttgacttcctgattgcttcatgtgagttcaaaaatcatctcaattttaataaacacaattgtcatttctaatcacccacttcaaatcatttcctcccacattcttccctatttcaataagcagcaccaccatccacctatttatcaaggcaaaatacttagaaataagttacatttaatccattaacaagtcatgcaaaaagacatcccaagtctgttcactttatctggatctgtctttgtcactactacactacatgaagccaaaaatttgtcttccctggagaattctgctgttctccagttgtgaaccccaacaatccaatctccacatagtagctagaattatttttaaaattgaacattatcgggggacctgccctgataatcacgtaggttcttttctattttcctcagcgtcagctggcttgagaaataaagggacagagtacaaaagagagaaattttaaagctgggggagacatcacacgttggtaggatccacgatgccccacaagccacaaaaaccagcaagtttttattagggattttcaaaaggggagggagtgtgcgaataggtgtgggtgacagacatcaagtacttaacagggtaatagaatatcacaaggtaagtggaggcagggtgagatcacaggaccacaggaccaaggcgaaattaaaattgctaatgaagtttcaggcaccattgtcattgataacatcttatcaggagacagggttttgagatcaaccgatctgaccaaaatttattaggtgggaatttcctcttcctaataagcctgggagcgctatgggagactggagtctatctcacctctgcaatctcgaccataagagataggtacgccccggggggccagttcagagacctacccctaggtgcgcattctctttctcagggacgttccatgctgagaaaaagaattcagcaatatttctcccatttgcttttgaaagaagagaaatatggctctgttctgcctggctcaccggcagtcagagtttaaggttatctctcttattccctgaacaattgctgttatcctgttctttttcaaggtgcctacatttcatattgctcaacacacatgctgtacaatttgtgcagttaatgcaattatcacatagtcctgaggtgacatacatcctcctcggctgacaggattaagagattaaaggaaagacaggcataggaaatcacaagggtattgattggggaagtgataagtttccatgaactctttacaatttatgtttagagattgcagtaaagacaggcataagaaattacaaaagtattaatttggggaactaataaatgtgcataaaatcttcacaatccacgttcttctgtcatggcttcagccggtccctctgtttggggtccctgacttcccgcaacataatattaatggactctccttgtaacctcccaggagcttccaatatgtttaaataaaacttaattccttactatggccaccaaggccgaatatgatgcagctcctgactttctctctctcttacctcatcttctgccactccaccccttgctttccatccttcagcccctctaaccttctttctgtctcttcaacacagcacacgccttcccattccttggcctttccccttttctgtctgtctggaacacttgtcccttagatcttcacatggctgtcttattgttcttgtctcagctaaatgtgagctctcctcagagagggctcccaaactacctgtgaatccaatgtgaagtgaagttgggtgaatccaattctctctgtcctatcaccctgatgtctttttttttaaaggcaatattgctctctgaatttttcttttttgttaaatatttattgggatactgtctgtctcctctggtattgagttccatgagagtagggatcttttttatcttattcaagtagaattctctgagcctagaacagagaccagaacataacttttgctcagaaacatacctgtggtctaaatgaataaaccgaagttctgggaactgatcaccctgggtattctagaaagcagaaaagggctcaagctcctgcaccctttcattctaatgacatgctatatcccttctcctccctgtgagaaattaaggcaaacttcctttctctcctctttctagttggaagaaggattcacagataaggaaacagtgattgtaagaaagaaaaaattttcattgagaattatctcttttctgccgggcgcagtggctcatgcctgtaatcttagcactttgggaggctgaggcaggcggatcatgaggtaaggagtttgagaacagcctggccaacatggtgaaaccccgtctctactaaaaatacaaaaattacctgggaggtggaggttgcagtgagctgagactgcaccattgcactccagcctgggcaacagagcgagactccatcttaaaaaaaaaaaaaaaaaagaattatctgttttttttttaatagtttaagttttagggtacatgtgcacaacgtgcaggtttgttacatatgtatacatgtgccacgtggtgtgctgcacccattaactcttcatttacattaggtatatctcctaatgctatccctcccctcttcctccaccccacaacaggccccagtgtgtaaagttccccttcctgtgtccatgtgttttcattgttcagttcccacctatgagtgagaacatgtggtgtttgtttttttgtccttgcaatagttttctgagaatgatggtttccagcttcatccatgtccctgcaaaggacatgaactcatccttttttatggctgcatagtattccatggtgtatatgtgccacattttcttaatccagtctatcattgttggacatttgggttggttccaagtctttgctattgtgaatagtgccacaataaacatacatgtgcatgtgtctttatagcagcatgatttataatcctttgggtatatatccagtaatgggattgctgggtcaaatggtatttctagttctagatcattgaggaatcgccacactgacttccacaatggttgaactagtttacagtcccaccaacagtgtaaaagtgttcctatttctccacaacctctccagcacctgttgtttcctgactttttaatgaacgccattctaacaggtgtgagatggtatctcattgtggttttgatttgcatttctctgatggccagtgttgatgagcattttttcatgtgtcttttggctgcataaatgtcttcttttgagaagtctctgttcatatccttcgcccacatgttgattgggttgtttgtttttttcttgtaaatttgtttgagttttttgtagtttctgggtattagccctttgtcagatgagtagattgcaaaaattttctcccattctgtaggttgcctgttcactctgatggtagtttcttttgctgtgcagaagctctttagtttaattagatcccatttgtcaattttggcttttgttgccattgcttttggtgttttagacatgaagtccttgcccatgcctatgtcctgaatggtattgcctaggttttcttctagggtttttatggttttaggtctaacatttaagtctttaatccatcttgaattaatttttgtataaggtgtaaggaagggatccagtttcagctttctacatatgactagccagttttcccagcaccatttattaaatagggaatcctttccccatttcttgtttttgtaaggtttgtcaaagatcagatagttgtagatatgtggcattatttctgagggctctgttctgttcccttgatctatatctctgttttggtaccagtaccatgctgttttggttactgtagccttatagtatagtttgaagtcaggtagcatgatgcctccagctttgttcttttggcttaggattgacttggcaatgagggctcttttttcgttccatatgaactttaaagtagttttttccaattctgtgaagaaagtaattggtagcttgatggggatggcattgaatctataaattaccttgggtagtatggccattttcatgatattgattcttcctacccatgagcatggaatattcttccatttgtttgtgtcctcttttatttcattgagcagcagtttgtagatctccttgaagagatccttcacatcccttgtaagttggattcctaggtattttattctctttgaagcaattgtgaatgggagttcactcatgatttggctctctgtttgtctgttattggtgtacaagaatgcttgtgatttttgcacattgattttgtatcctgagactttgctgaagttgcttatcagcttaaggagattttgggctgagacgatggggttttctagatatacaatcatgtcatctgcaaacagggacaatttgacttcctcttttcctaattgaataccctttatttccttctcctgcctgattgccctggctagaacttccaacactatgttgaataggagtggtgagagaggacatctttgtcttgtgcccgttttcaaagggaatgctttcagtttttgcccattcagtatgatattggctgtgggtttgtcataaatagctcttattactttgagatacataccatcaatacctaatttattgagagtttttagcatgaagggttgttgaattttgtcaaaggccttttctgcatctattgagataatcatgtggtttttgtcgttggttctgtttatgtgctggattacctttattgatttgcatttgttgaaccagccttgcatcccagggatgaagcccacttgatcatggtggataagctctttgatatgctggtggatttggtttgccagtattttattgaggatctttgcatcgatgttcatcagggatattggtctaaaattctctttttttttgttgtgtctctgccaggctttggtatcaggatgatgctggcctcataaaatgagttagggaggattctctctctttctattgattggaatagtttcagaaggaatggtaccagctcctccttgtacctctgatagaattcggctgtgaatccgtctggtcctggacttttttggttggtaagctattaattattgcctcaatttccgagcctgttattggtctattcagagattcagcttcttcctggtttagtcttgggagagtgtatgtgtcgaggaatttatccatttcttctagattttcaagtttatttgcgtagaggtgtttatagtattctctgatggtagtttgtatttctgtgggatcggtggtgatacccctttatcattttttattgcatctatttgattcttctctcttttcttctttattagtcttattagcggtctatcaattttgttgatcttttcaaaaaacaagctcctggattcattgattttttgaagggttttttgtgtctctatttccttcagttctgctctgatcttagttatttcttgccttctgctagcttttgaatgtgatcgctcttgcttctctagttattttaattttgatgttaggttgtcagttttagatctttcctgctttctcttgtgggcatttagtgctataaatttccctctactttaaagctagaattagtttctaaaactgaacatgaattgactctccttgtaaccatccagtagcgtctcacatctatttaaataaaattcaggctgggtacggagactaatgactgtaatcccagcagtttgggaagccaagacaggcagattaccggaggtcaggagttcgagaccagcctggccaacatggtaaaaccctgtctttactaaaaatactaaaaaattagcctggcatggtggcaggcgcctgtagttccagctactcgggaggctgaggcaggaaaatcacgtgagcccaggaggcagaggttgcagtgagccgaggccacgccattgcatccagcctgggcaacaagaacgaaactccatctcaaaaaataaataatgaaataaaaaaatgaaaataaataaaataaaattcaaatttcttaccatggacatcagagcctaatataatgaggctcctgacttcctctctgcttcctacctcatcctctgcctctgcatttctttgaatgctatagttcagtctctctagccttctttctgtccctgcacataatttcccacaccagggcttcccaccccccctgcccccacattctgtctccctggaactttcgtcccttagatcttcacatggctctctacttattttgttgtctcagctgaatgtcactttctcaggcagagctttctaaacacatgagctaaagttgggtgaatccatttctctcttttccacaaacctgatgtcttttcttcagtgcactattactctctaatgttatcttctttgttaattgcatattgggttaatgtctgtctcctctattgttgtgtaacttccatgagagtcgggaccctctctatcttaatcaaatacaatgatttgaacttggaatggagccgagtacacagtagctgctgagaaaaataagtgtggtttacatgaataaaccagggatctaggaactgatcactgtttggatcctggaaagcaagaaggggctcaaactccagcactctttcattttgatgtcacactagaccccttctcctcccggtgtgaaatacaggcaaagttcttctttctcctccttctagttgtaagaattcacagataaagattaacagtgatttaagaaataataaatttttaaattaagattcatctattttttgcctgggtgcggtggctcaaacctataacccaagcatgttgggaggtcaaggctggaggattgcttgagtccagcagtttaagaccagcctgggtaacatagcaaagtctcatctctagcaaaattacaaaaatcagctgggcgtggtttcctgcctgtagtctccactactctggaggctgaggagggaggcccgcttgagcctgggaggcagaggttgcagtaagcctagatcataacactgaactacagcatgggtgacagagccaggccttgtctcaaaaaaaggaaaaaatctctttcaatggatctcatagtgctctgggtctgtgcaagctttaggaatttctggaaatgatgacaacatagctggggaaaaataaaaactggaggaagaggtaagcagacatggctaattaaggaaagctgagggcatgacgggtgaacctaggaaatttaagacaagaccccagtaagacaatgagttcccaggacttgcccattgactttcagccctatgagatgtgaacaatgtccacattgtctctgtaaccccacacagtatatagtttgaacattattaaatttctgatatttgactgtttttgacttacaaaaatagaatttcatataatttatcttacgttagttgaatatcttcttgttatgtctagttagagcatgtaggacatgtaggagaaatttctatagaaaggttagaagagattcataataaacactaagccgggccaggttttccgaggatgccttaagttctttaggcaccaaagaacaccccagagatgctctttatctgtagggtgactccaagtactaaagatcttagcttcagttccagggatttttccccataagaaagacagagcactaagtataacttctgtcagagaacctacatacactacagggatataggctttataaacattggagttcagaaagaaaaagaaaggagataatggggaggccattggtacatcctcacatttgaggaagaggggccaacaccaaagttcctgtggaggacatgacccaggatcctctagaagaaacgctttgaattatcttgactcccacaaaattttcagtaaaaacgtcattttgtctgacgtaagtcaacataataaagggaagtgctgtatggggaaattattttagcatccttattgccaaatcctctaaacaccctgaggacatgtgatgcaaaggttttattggtggagatttaaaaagaaatgatctgtacgaaggccccttacacagtctcatggactgtgtcatgagcaagtagtcaagctcctttcgtggaggagataatttgggatccaataatacagatgcacaatctctgaccaaaacgtcacaaagtcttaagggacatggcctgggcacaatgttaacaaaactccctattttccccaccccatagtagctcagcacccacaatgtgcgcttatgtcgggtgtccccagccaaagccagtgggaagctcagcaccatcagtgtcactgtcagcgctgccatgcaggagcctccagggagcttcagacacaccatgctggagaacaggaaaggaccaggggccagaggaggaggcaagtcttactcaggaagaactatgaacccctccacccacattccaaattatggggaggaagttactgactttcttgctcctgggtcgggtaatctcgtgttggagaaccaatcagcatctgagttcaatagcatcatcagttgctggtcagagatgctgtatgaaggtcctcttctgaaacagaatttccttctttaaaggattgtttttaaattagtgcttgaaagatttgatccagttgcatgtaaaacactttaattgggtccgattgtgagccagctctgtgctggtcagtgatgtgttcgtaagtttgagccttgtaagagcattcatttcccacttgacaagacaactgtttgcagaagtgagtgtgtgagtgtgtttaggagtaaaggagatggaaggaacatggttgtaaatccggagacatttaaactggtccttattgcaccatatcttaatgttgtagatttgggaaaattatttcatgtctcacagttgaaatgaaggcactgtgatctttcaggtctttcaatactggaaaatgctgtgattctgtggacgcctgaaggagcagcagccccgggtatctgataacatgacagaatgacagctattgactagagagcttaatccgtacctgtttacaggtagggatgtctttaataagttaaaggaaattgaaagtttgttaataatttaatctgagtaaaaatatctttttcaagtgtgtctcctgatgctgcccccaggtttagtggcccctccagaacacacacaggcaaggggctaacaggggccacctatgtgcaatggagggcctgaaggtggctttgtatggcatttaccctaacaatgtgataaggtcaactgtgcaatccaagtattcatgggtctgagagatcgatcgaagactgtgaaagtcagctgttcatagaacaactcttttttttttttgagatggagtctgtctctgttgcccaggctggagtgcagtggagcgatctcagctcactgcaacatctgcctcctcggttcaaagattctcctgcctcaacctcccaagtaactctgactacaggcacttgccaccatgcttggctaattttttgtatttttagtggagatgggtttcactgtgttagccaagatggtctcgatctcctgacctcatgttcttcctgcctcggcctcccaaactgctgggttacaggcgtgagccatcgtgcctggccacattatgttttaaaataatgaatattttatgtgaagagtgttcaatccctcattcttggttcccattatgatttcctcatttgattgaggctatagcactttatattatgtttctcttgttttatcataagggaagatacaagacgactttgctaactaatacatttcacaatattcaggaaagagaacactagggaaaactatgaattacatcagttgatgtaactatgtaatattaaacatattattatacatttagataattactatgctttttattaatataaatataacatctaagattcagaatggacttcagaatacaactatgcttataaagttctgcattaattcacatgctaccacataggcactcatttgtcttttttttgtttgtttgtttgttttgagatggagactcgttctgtcgcccaggctggagtgcagtggcaccatctctgctcactgcaagctcagccccccaggttcatgccattctcctgcctcagcctcctgggtagctgggactacaggcgcccgccacaactcctggctaatttttttgtatttttagtagaaacagggtttcaccgtgttcgccaggatggtctcaatctcctgaccttgtgatctgcctgcctcagcctccgaaagtgctgggattacaggcgtgagccaccgcggccggcctaaagtctgtaacctgtctttatggagaactacttttgaggccgtacacttctttcagtaacaatattgtctaagtaatggtatggcgaagttgtttgtaccttttctggagctatattgacattccatttagttaaagcctactttgtttcttggaataactgatgtaagatttgatctgtaggagcggccaaaagaatgtcatccataaaatgaatgatgtaagcagtaggaaacatatttcgggctcctttaatgcctgtcctacaaaatgctgacataacgtaggactgttaagcatgccttggggtaaaactctccattgatagcaagaaacaggttctttttgattaatagaaggcacagagaaggcaaatcgaggcttatccttcttgtgtaatggtatagtgaagaaacaatccttaagatgtattactacaagaagccaatctctaggaatgaccactggagttggcaaaccttgctgtaatggacccattggttcaatttgtgcattaactccaagcatgcagcagtcaccaccttccggacttttttggaataacaaacactggtgaattctgggggcttactgactcctctacatgtcctgtgtcctgttgttcttatactagctgctgaagttgtgtcagcttctcctgagataggggccattgatccacacatacgggtttgtcactggccattctaatggtaaggcagagggtggaggagaaatatcaatgaccctcatcagaaatcctgacgacctagccctcttctgttttttccagttattgatgttgggttagcttttcctcgtaggaatttccctaaacctttcccactctgatatcccatgtccttcaacattttaaattctgggttatcaaagttttcatttgtaagtctcatattccatgctgtaagtaagtctcgatcccataaattgattgccatatttgcaacataaggctgaaaagtacatggctgtccatccggaccaagacaaggtaaaatgtcagcactctgttgaacacttttagctgctcctactcccactagggatgtggaggttagtctgagagaccatactgggggtcagtccttactggatattactgacacttcagctcctctatccataagtcctatgggctatgggatgggatagatagacttcccttgtagttgtgctcccaaaccctttatttcctcgtttctcctttcatggagaaggatttaatttgcagggaataagcaacgaccgagcaatatattctcccagttcaaaaatgcaaagattttcgacattaaaactacttgaatttctccttcataaatggaatcaactattccagggactacagtcatgccttgcaagttaagggggcttttgcctaaaattagtcctatgtatcctgttggtaaatatccccaaatgccagtgggaaccttggtaggtttgtctcctccaactaatgtagttctttctctggtggggatatctaatcctgcacttcctggtgttcctgaggtgaggaacaccaggaatcaatgtttttcctgagacccatccctgaagtgggactgtggtctgaactggaaatgccctcattgtttgaggggcccgggtccaggcccccttctagtttcccgacatggggatgctgtttcgatgaaattttgagcagccctgattagcctagtgatttcctttgttacagtgaggacaaagtcctggtgtttttttccgctgggtggggcactgcatcgtaatgtcctttctgtcctgagatctggcggaattcctttttaaaatgtccagttttggctggacacggtggctcatgcctgtaatccaagcacgttgggaggccaaggtgggcggattacaaggtcaggagatcgagaccatcctggctaacatggtgaaaccccatctcttaaacaaatacaaaaaattagctgggtgtagtggcaggtgcctgtagtcccagctacttgggaggctgaggcaggagaatggcgtgaacctgggaggaggagcttgcagtgagccgaggttgcaccactgcactccagcctggacgacagagcgagactccatctcaaaaaaaaaaaaaagtacagtttttccacagttataacattttcccattttagggtttgacccttggttccttttagatttgtcaactgctaaattagccattgcttgcactaatattgtagagcgatgaagttcagttcccacatcttgacaagctctgagaaaatttcccaagttttttgtacacctcacaggtgccgatgcacgtttacaatctgcatttgcattctcaaaagctagagttaaggttagcatcactgcagctgcggtgtgataaatctgatgcttcattgccttctatagtcatgcaagaaattgtgcataaggttcttgcgacccttgcatgatatgtaaaaaggattgcactgggactccctcttctggaattgtggcccagtcacatttagcagcctgtgcacactgctggcatttgggagtgccatttgatgttccaggtctgaataagggccattacctaagagcatgtcctctgtaatgtctctgtgtccagccacacaattccgtctagccttgtctgcacacatttcttgccaatttaaattccatgtcaggtatgcactaggagacaaacaagtgtgagccaaattctttacattgaagggtagaaggcacacagcaccaaatacagatactagcaatcctaaagtgaacaggctctgtacaccattatttaccacactccttttaattccttcaacaacttaaactctagtggagtgtgttcatgaataagctgctatggattatttggatcaggccttacagaaataggaaaagtgcaaggtcctcagggctctccagctatggcagcagagtgtaaaattctctgtattggggtctctatttctgctaccgaaggaggcagtacagatgtttctgctattggaggaggtggtataggccaatttttatcctccttctcctgttttttattttcaattggagctgtgggtgggacaacagattttttcagatttttagactcagaacatcactcctgctgtccagcagaataagaaggagataatggcagaaggacagtatggactaaactccaagtggagaaaacggaaggatcaactttgagacctttttactgagcctgttttaatccttctgctctgtcccaattttccatatcaagagtgcctgtctgtgggaaccatgggttatgcataataacctcctgcagcattgtagttaatgtctgagatctaacctgagcaccagattatttcaacaaaactttaagcaactgcacataatgtttttcttcaatagacaaattctgcctcacgttaccctgattcagaaaacttcccgttcccaatacttctttagagcactgaccttatattgctcccagtacctctttagggcactgaccttatatcagctgccagcagactcatctcggggtccccactcgtcttgtcaaattcagttcctctgctccaccagatcttctttgttcacattctcatgtccctgtgtttagaaaccactatggtgtcgccctgtcgctgtttgaacatcactatgccatggaccctgttagactgaacataggaggatgaacgtggaaataaagacaaaagagtatatttggaagaaggggtcaggggcaccttgctctttgtgaataaaggccctgagccttgagcttccttcgtatttactgagaagagatagcaagaagggggtcattgtcggtctgctgcttgctccagagcagccttgcaagactgcattccttgaacaatagattctagatgtcccagtagataacctgaaggagctcagcgccagggagtgattgccctcagcaaaccttctggtggccagcacagaggagagtttgcccctgctctgtattcatgataaacagtttgctgtttgatcatattgcctcagtggaaattctgagttggtcatgattctccagcctccggctctctacactgaatggattcaacaagaaagtggttgaatttatgcaactgtctagttatttataatgaaacaagcaaaaattaaccataaagaagtgaattgggtgatgattgtataaaagatgtgagtctaggccaggcatggtggctctcgcctgtaatcccagcaatttgggaggctgaggcgggcagatcatgaggtcagaaaatcgagaccatcctggctaacacggtgaaaaccagtctctattaaaaaaatacaaaaaaattagccaggcgcagtgtcaggcacctgtagtcccagctactcgggaggctgaggcaggagaatggcatgaacccggaggcagagctggcagtgagccgagattgtgccactgcactccagcctgggtgacagagtgagactccatctcaaaaaaacaaaacaaaacaaaacaaaacaaaaagatgtgagtctagacttttcagaaagagcacagtgtgaaccagtgctctcaacctcagcactattgacattttggaccaggtaattctttgttggtgatggaggctgttgtgtacattgcaggttctctagaagtgtccctgacttctactcattaaatatcagaagaaatccctgttgtgacaaccaaaaattcctccaaacattgccacatgttccccaagggtgatgggagggaagggaggggtggtgaactatccctgggtaagaaccatgggtgtgaaccatctgaaaaaatctgtgttgaacaagccactattagttatggagcagctgagaattactttgaaaaacatctgttgaaaatcttggtcctacagaaaatgaaaatgttgtagaattctggtcccaatacagtgctatgtttccagaaaatgaacttgtggagaaccaagatttactgatttccttgcctttataatcagtcatcaaatcatatcatttatcttccatagcatcttctttcttaatttctgtgccactggtccactaattatctgtagtaatgaatcacaaccagagccattttattcccatttaatgcccgaactaactcatttctctcagtctcccactcccaataatactagcaggcatcaaatttccagccttggcctgaggtagaactctcggttttgtagtcaattcccctcagaaagggagaaatcaagaaaatgacattctcatacagacagtttgcaaaaatgagcaggtcccagactttgagtacgacctttgcaaagctctctttgccctttagaaacgatgccctggatcaaaaacgtctgtctttttattcttaaattatctaagcactttctttacagacagaaagttaaaaaataaacatgtgtgaagtcgctgtcactgtggtttgcatgactagcactgtaatccatgctcatgtgtcccagttagggtcaaaaggtttggcaaataaaaccagaggatgcccacttaaatttggatttccaataaattatggtgtgtatctgaaattcagatttaactaggaacctgtattttatttggcagcctcaggccaacttgctagtcaaacctcagaacaaggagtgatttaatacttccttgtgttcttcaacacatgcccaggataggcatatagaacttttaaaatgataaatgcaaaatgaatgaaagtttctcctatacattggaactagcagcccttgcatctctgctcccacttcaagaaacaacctgatacatatgaatatcaggaattctgtcaataattcagacacaatctggtcactactcactaataatgggcagactctcaatctctagaatcagagaatctgaatagaaacataatctcttctacttgggtcaatttttactaaccaaagcctttttgtaatctatcaaatgcatttaataatagcatcatcttcacaggattatttttaagtgtaaaattaaataatgacttcttagcactgaccacataataaacactcaaaaatattttcattttaattttttatgatccctttaactgcagctcacattatttttcttattccttgattctaaagcaattagtatcttcatcatgattttgcaattgttttctgttcttctattagtttcataaagaattgtcattctgaaaacatagggcagaaacactagcttatgtctaataatgcagtatacctaaacaaacctcacacaaaaggcatctgctgacataggagaaagggactttctacatgctcagatttaaactgcaatctgatttctagcactacatttgggatactgggttttacttatatcttctcaattttagattccagagatgtatatgtttttaaacaccacagataaaataggatcattattgaaattgtatactgaaaatcaaaggcctggtacacagtcactgcaaaatgttatatggcatgtactgatggagaccagattcattttattcatcactccattctcatgacttagagcagtagctggcatattctaagtcactaataaatatgggttgtgtgaaatattggctgtgtgatgttttgcatgaacattcaccactgcacacagggaccctctcgtatttccttgctaatgatgactgagcatctctggttcacagatcctcctgcttctcttcagcctctttagccttttcctttagattcagctggcttcctgaacccagagcgcagtccttccctgaagctctctactcagaacagtcaaccttaacctcatcctcacttctatttgctcttcaaatggtccaatccattttccatcctggatactccattgactgcaaataccaactccagcaaacccagcacttgcttctctctcacattctcacttcacccacttaatgatactcattggcttctccccgcttcttgaaaaaaatctgttttccttgacttacaagcattatgttctcttggtttttctcctacatccctggggctccctctctgtcccctttgctggcctgtgccttcttcttttttctacacacaagctattaccctatgtatcctcttccactccctggaatttaacagagtacacgtattgatgccatcaacataaatacttccagccctggactcaccgtgagtctcttaaattccattgaccttctgattgttccacataaacgtcaataaatcatttccaaccacccacttcaaataatttcctcccacagttttccctatctcaataaacaacaccaccatccgcttatttgtcaagacaaaatccttagaaataagcttgattgttctatcccctttacagtaatccattaacaagctgagcaaattacatgccgagtctatccacttcatctttttcactgtctttgtcactaatgcacaccaggaagccatgagcctgttttccctgaggattccctgctgtgctcctaaatagtcttcctgaccacttgtgaaccccagcgattcaatccccacaaagtaactagaattagttttaaaaattgaatataaatggactctccttgtaaccatgcagtagcttcccatatctgtttaaataaaattaaaatttcttactaagaacatcagggcctaatatgatgaggctcctgacttcctctctgcatcctacctcatcttctgcctctccattttcttgcttcctataggtcagcccctctagccttctttctgtccctgcacataatttcccacaccaggatttcccccacattttgtctccctggaacttttgtcccttagatcctcatgagtgtctacttattttgttgtctcagctgaatgtcactttctcagatagagctgcctaagcatatgaaccaaagttgggtggatccaattctctctttccacaaacctgatgtcttttcttccgtgcacgatgactgtctgaaattttcttctttgttaaatgattattgggttattgtctatctcctctatgattgcgtaagttccatgagtagggaccagtccactgtatctcactcaaatagaatgatttgaacctagaagggagcccagtacacagtagctgctgataaaaataagtgtggtttatattaataaaccagggttctgggaactgatcactgtttggatcctggaaagcaagaaggggctcaagctccagcactctttcattttgatgtcatactagaccccttctcttccctgtgagaaatacaggcacacgactactttctcctccttctagttggatgaattcacagataaggaaacagtaattttttttctcttttttttttatttttgggatggagtctagctctgtcgccaggctggagtgcagtggcgtgatctgggctcactgcaacctccgcttcccggattcaagtgattctcctgcctcagcctcctgagtagctgggattacaggcatgtgctaccatgcccagctaatttttttatttttagtaaagacgggtttcaccatgttggccaggatggtcttgatttcctggcctcatgatctgcccatttcagcatcccaaagtgctgggattacaggcatgagccactgagcctggccaaggaaacagtaattttaagaaaaaagaatttttttttaaattaagattcatctctttccggctgggcatgttggctctcatctgtaatcctagcatgttgggaggcaggaggatcgcttgagcccaggagtataagaccagcctgggcaatatagcaaaatgcagtctctaccaaaattacaataattagctgggtgtggtttcctgcctgtagtcccagctactctggaggctgaggagggaggatcacttgagctttggcggcagaggttgcagtgagcctctatcataccactacactacagcctgggtgacagagccaggccctgtctcaaaaaaagaagaaattatctcttgtgatgaacctcatagtgctctaggtctgtgcaagctttaaggatttcgggaaataatgacaacatagctggggaaaaatagagagaaactggaggaagaggtaagtggacatggctaattaagaaaagctgacggcatgatgggtgaacctatgaaatttaggacaagacccgagtaggacaatgagttcccaggacttgctcattgactttcagccctatgagatgtgaacaatgtccacattgtctcggtaactccactcagagtatatagtttgaaccttagcaaatttctgatatttcactatttttgacttacaaaaatataatttcatataatttatcctacattcattgaatctcttcttgtggagtctagttagagcatataggagatgtaggagaagctagtatagaaaggttaaaagagattcataataaacactaacctgggccaggttttcagaggatgccttaagttctttaggcaccaaagaacaccccatagatgttctttgtctgtagggtgataccaagtactaaagatcttggcttcagctccacggatttttccccataagaaagaaagagcactaagtataacttttgtcagagaacctacataagctacagggatacaggctttataaagactggacttcagaaagaaacgaaagtagataatggggaggccactgggtacatcttcacttatgaggaagaggggccaacaccacaggtcctgtggaggacataacacaggatcatctaggagagaccctttgaattcccttgactctcacaaaattttcagaaaaaaacctccttttgtctgacttaagtcaacataataaagggaagtgctgtatggggaatttattttagcatccttatttctaaatcctctaaagaccctgaggacatgtgatgcaaagttttattggtagagatttgagaagaaatgacctgtatggaggcccttaaacaagtctcatggagagggcaagtagccaagctccttttgtggaggaagtaatttgggatccatgtgataaagatgggcaatccctgtggaaaacgttacaaattcttaagggacatggactgggcacagtgacaaatttaggtccctactttaccccccttatggtagctcagcaaccgcagtgtgcacttaggtcgggtgtccccagccaaagccagtggggagctcagcaccatcagtgtcactgtcagcgctgccatgcaggagcctccagggagcctcaaacacaccatgctggagaacaggacaggaccaggtgccagggtagcaggcaagtctcacattcacggagaactatgacctccctctactcacatccccaacacagggagtaaggtactaatttctttgctcctgggttgcgtaatctcgtgttggagaaccaatcagcatctgagttcaatagcatcatcagttgctggtcagagatgcagtatgaaggtcctcttctgaaacaatttccttctttaaatgattgttttaatttagtacttggaaggttggaaccagttgcatggaaaacactttaactgggtccttattgttagccagctctgtgctggtcagtgatgtgttcacaagtttgagccttgtaagagcattcatttcccacttgacaagacaactgtttgcagaagtgagtgtgtgagtgtgtttaggagtaaaggagatgaagggaacatggttgtaaatccggagacctgtaatctagtccttattgcaccatatcttaatgtcatagatttgggaaaattacttcatgtctcacagttgatacgaaggcactgcgatctttcaggtctttcaatactggaaaatgctgtgattctgtggacgcctcaagtagcaacagcccctgtgtatctgatgatatgacagaatgacagctgttaactggagagggtattctgtacctatttccaggtagggatgtctttaataagttaaaggaaatggaaagtttgttaataatttaatctcagtaaaaggttgttttcaagtgtgtctcctgatgctgcccccaagtttagtggcacctccagaacacacacaggaaggggcttgcagggaccacctatgtgcaatggagggtctgaaggtgcctttgtatagcacttaccctaacaatgtgataaggtcaactgggcaatcgaagtattcaggggtctgagagattgatcaaggactcaaagtcagctgttgacagaacaacactgctgtaaaataattaatattttatgtgaagagtgttcaatccctcatcctggttccaattaggatttcctcatttgattgaggttatggccctttactattatgcttcttttgatttatcataaggaaagatataagaagactgtgctaactaatatgttacagaatgttcaggaaagagaaccctagggaaaaactatgaattacatcagctgatgtaatcatgtaattttaaacatataattctacatttagataattattatgctttatattaatataaatgtgacatctaagattcagaatggacttcaaagtacaactatacatataaagctctgcattaattcacactgtaccacagttgagataggcactccttccttatgtgccttagtgtttccaggagcaggattctcaccatgctgcaataaaaatgagcatttgactttgtactcagaattgtactaaaagctttatatgcttcatatttttatttaattctcacatcagctcagtaaaataaacaccgttttcatgcttacaggtggagagactaaaacgatggaaataaaacaaattttgccaagatacactagtaaacagtacactatagattgagccaaattatatacctctcaagctcagccattagatcatactccttcagaaagaaggggaaaagcaaaagcaaaagaaaaaagaaacaaatttgtgaaaaaaagaaactaattgtgatagtagtaatccaggaaatccagctaaggttcatgttagtatttcaggataaaagggtggtgatgctggcggtggcgagctgtccagagtggccggctgctgcgggaagttgcaagcggtggcggcaggagccactgagggagtagtggccgtggtgggacccttgtgccccatatcccctgtgcctcgcgtcactgaggcagctgactgcactgaccccactcttgagcagccagcaggaccgcccccaggcccagagccttcaccactcctgcgttgctgctctcgccctgcagttgtggggagggcatggagctggggccacccttcagtgacccggggtgggacgtgggagtggcctcactttgaggacccggccagcggcaaggccgctgtcccgccctgccaagggcgcccagttcctgcgcctcaggaagaggctctgcttgaggccgtccagggttttgtccccgcgggtggccacccagcctgatgctcctgacagccaggcccgggctgtgatctgttccccaaggtgcctcccccgccccatccaggcgagaaggagccccgggcaccctgagtgctagcagaataacttgcagagacatcacccttgccccacatgctggcctgcgcccagcgaggggagctgcccaccccaggctgccagaaggtgtgacgggggatacctgcaggctccacggaatgggttggaaaccccaccctcccggccctccccgcaggcagtaggatccaggcctctctacactccactccctcaagactgagaaggccctcctgtccatgcaggcttgggggtgtctgttcccactttctggcccctcccttggcctcacccgggtcccaggtgcccactctgatctcagagtggagttggggcagagccccagtgctgtcacagactggctgggtgtgtgcacgctcagggaagtgttgacacaccagccttttgccacctcagtcacagggaagccaagggaagatgggcatgtaatatttgaagtaagtttcttatagggagcatgttgaagagtcattgcttttcactctggcatttgtctttttacacactttacatgtaatgcagttattaatatgtgagctcttatgactgccatctgctttttgttttcttttttgtttcctttgggtttttcttctctggtttctttcctgttttccaatgtgttccttaagcaatttttagaattccatttttaaatcaatctttttttggtgtatctcattgtatagtttttgtgatttatctgtctgttaacataacttatcatagtctactggtgctgacattttaccagtttgactaaagtgtggaaactttacctcctttatatccctttccacttctgcatgtgtaatatgtatgttttattttctctacttgcatcaaaaccacatctgtcaatgttgtaatttttgcctcaaccatcaagttaatttacaaaactgaagaagtctgttgtatctaaccatatttttactcatttgctgtttacttttttcccaattgtccaagatttcttccattatcatttctattccagttaaagcacttcctttagcccttgttttaacataagtctcctagcatgaaattctcttgattttccttcctttaagtatgtcatggccaggcgcagtggctcacgcctgtaatcccagcactttggaaggccaaggcaggcggatcccatgagctcaggaatccgagacaagcctgggcaacatggcaaaaccctgtctctgccaaaaatacaaaaaattagccaggcgtggtggtgtgtgtctgtaattccagctactcaggaggctgaggtgtgaggatcacatgagcctgggaggcaaaggctgcagtgagccatggtcgcgccactgcactctagcctgagtttttttttttagatggatcaaaactccatctaaaaaacaaaaaacaaacaaaaaaagaaaagtaaaagaaaaaaaaaagtcatgatagaacattttataataatgtttttactggatatacattctaggttaacattcctttcagccattaaaatatcttgtgccacttctgtctggtctgcctgatttctaatgagcaatccactgtcatttaatttattttcttctgtgcatgagatgtcctttctctcttgttgctttcgagattttttttggcataaatttctttggatttattttcatttgggtttgcacagattcttgaatttttacatttaagcctttgtccaaatttggaaagtagtcagtcttccttcaagcactctttgggcatcacccatttgtcatttccctctaagactccagtaacacaaatttcataccttttgttataatcttacagatttatcagtatgaaatcatactaaatattatgaaaaactttacaaaataaatatgcatgtaataaataattcaaaatgtacaatgtactgtgcatgtaatgaataaattattcaaaatgtacaatgtactgaagctgacaaatatcataaaataggaagatttccacatctcatagagaaagtaagtccattctataaagctttcccaagacaaaaccccaggttcatctagcttcaataactacttaaaaatatttaaggaacaaacaacattaactttatacaaacttcaaacatatttggaaaaaggaaaagcacttgcaattacgtttgatgagatctgtgtaaactttacttcaagacttgaacggatctctacaacgaataggaattaagagaccaataactcttatgagccaagttcttaaggaaatattagccaagtgaattcagtgatatatggctactacatcatgaccaagtggaggttattccagaaatgtaaggttgtttgagcatttgagaatcaattagtgtgattcatgacattaactgaaggaaggagaatacacatgcaaccaactggatagagtcatgaaatacgatttgacagaattcagcacttggccttaattttcccccactttcgctgtgctcctgctctcaccatgtgatacccaggctcccctttccttcccccatgattgttagtttcctgaggccctcaccagaagcaattgccagcaccacacctcctgtacagcctgcagaaccctgagccagtgaaacctcttttctttatgaattacccagctccaggtatttctttctggcaatgtaagaatggactaacataattatgctctatcatgaacaaatagaaaacaaaaccaagaaaataattttatcaacttcctcacctctttgcttttttcttctacttttttcaacttaaatttgcttctttttattattaaaagtttacacctttgatttttacatatttatccttttataatacaggcatttaaaactaaatatttttctctaaggactgccttggttgcatctcgaaaatttttaaaattcattttaatattattttatttaaaattattttctaatttccttctgatttcctctttgacaagccataaattatttagaaatgtattattttagttccaaaaatttaggcagttttctcaatcttactaatttgtaatttgataagattgtgttcagagaatatactctgtatgattttattcttgtaaaagtactgagtctagttctatagtcatagtatttgttctatttcatgaattatctttgtgcaatgcaaataaataaatattttgtagttatcagatgttgtcaatttatgtcaattataaatgccaactaagtcaagatggttgaaagtattgttcctatcttgatttccttcctgatctttgcatgaagctagagagatgtttgttgtcttctgtctacgtccctagttcccacacaaccagcatgaagtcagaaaaagttctggaaagagaatcagctgacagggtaaagtagatatgtattattcaggggccctctatagattgtaatgcatcacacaagcccacggggctatttacaactcagctggtttgtccttgctctctcacaatctccctttctcagccaggcttaatcttccacccatgttaagattcagtagatggaccaaagaatgagagtggacacttgtccctgctcacctaagtgggatttgttcatctctggaatttggaatttttatactttttgatccacggctggttaaaattttaaaaataagattattttccagtttatccatttagtttagtctatatatctttttgctcttatagtaacagtgacaattcttataattttccacctcctcactgcattgtggtttaatattttttccaatctatgttgatagtcctacataatttacttaaagccctgaatatttttcctttgtatggctataccacagtttacctttcttatatctaaatgtagagaatgtttcttttctcccctgttacattttttttatgtcatcatggatatatgaggaagaatttactgagactgtaacaacctagagtggaaatactgtattatccaaactactcacagggttacaccaatatatgctcaccgtgccccatacagcaccagatgtcatcctgcagtgtgctgtcacttcgcatgctgcatagtttttaggatgtacaaaatttttataatcaagacaaattaatcagtttttctttttgaatctggaaatgtttttgttattccaaaccgtggctcaacaaactaccaattttatgtctccttgggctcatgtaggattgttctttaagacggatgttaaaatgagatttttgttgttttcatcagcatataataactgtattttgagttttaatagacactactacactgccataactcaaaatcctaataatatgagagagtctattcccttagaatcttgattttaaaacaaactattgtacttgtcaattgtggagtgggagaaatagtttattacactgctgtttgaatttggatttttctgttcattggtgcgtttgagcaaatatttatatttatcggctattagaatattctcttctatagtgagtctatatcctttgcccaattatctatggcatttccatgaatttatttattgattagttaacaatttttctaagaaagttagcccattgtctgccttacatgatcaaatttttcctgagcgtcatatacttcttttaattttgttattttcttcatgcaaataaatcagtaatcttcttcaaatattttttcatttgtatcttttggattttatcttgcttacaaagtcttattttttaaaaaagaattattttaacacgcttactaaagcataatttacatactacaaaattcactcattgtgtcacagctacggtttggaatactacaaaattcactcactgtatatgtaaaattgaatgatttgagtaaattaatagatttgtgcaattatcacaacaatccatttttagaacatttctgtcatgtcccaaatttctctatttatagttaagtcccactgagaccccaaaccctaggcacccagtgatctgcttttgtgtctataaatttaccttttctagatatttcaagtaaatgaaatcatatgacatgtaatctttcgtgtccaatttctttcacttagctaacattattgaagttcacaagttttgtagtatgtatcatcattttgtgttttcatttctttttgtcttttttcatgtgtgtaaatttataaggtacaagtgtagttttggtacctgcatagattgcatagtggtgaagtcggtgtttccacagtatccatcactcaaatcacatgcattgtatccattaagtaatgtctcatcatccggagtgcaagggtggaaacttgctttgggaaaactaccgtgatgttcatggtatctccgctgccagatgagtctagttttgcccccttttattgttgaatgacattgccttgcctggatgtagttgaattttgtttatctatttactagttgaaggatatttggattgttttcagttttggcctactatggctaaggctgttctgaaccctaacatatatctttgtgaggacatacgtttttatgtctcttaggtagattccaaggaatgagattgctgggtcataaggcaaacatatgttaaactatttaagaaattgccaaattatcaggtatttgtaaactcatatactcccaccagcaacgcataagggtttagaaagtctatttgtcttcaaacataattataatgatgatgacagtattagaaataacatctgtcttggtaattttatattttctctttatgtttcaagttttatttatccaggatctatttagtgaaagaaatgagtttggaatacaacttacaaaaactgaaactaaatctcaactctttctgtttctaattgtagactctgttttattaacatatttaattaaaaaaatcagtaacaaatgcatttctaaaagtaaatgtatagtgtgttttagtgccttacagagctattcattccttattctactttttttcaataatttccctggaaaatacatttacctcataaaataacatgtcagaatacttaattgagttctaaaaacaatcctatttgcttgcttttttgttctattgtaattgagttaatggctgacatttaataactctctctatatgtgtgtgtgtatatatatgtgtatatatgtgtgtgtatacatatatatacacacatatatatttgcatatgtatgtgtgtgtatatatatgtatacacacacacatatatacacacacagatatatatatatatacacatatatatatatatatatatgcacacacacatatatatatatatataaagacccaaaaccctgaattgagggtgcctgtcaggaatctataggccttcgtgtggaagttaactcaaatacttacgacctgatagtaccacaatctatcatttccctaccctgaaatcaatttctgctactccagccaccatttctttatttttaaaaatatttgattttgctccttttcttcccatgtgcatcaggccgactctgcaaaggttgcatcctggcttgtctgagcccgtgtgatcccacagtcgttccaatgcatgagaaagtgggtactgggaacaatctggaaacagtttagttgctccttctaaaggcacacaggagaaagaagtatccttttcctgcctttgggagttgttgtgaatgaataacaaacctaaagctgctgcaggggtcaccctaccatctcaggaaagctgagatactgtgtgtgatagagagatgagctatgaagttccaggattgctggtgatgccactggcctgctgagttgagcaaccctgaagacgcccagtcttggatctatcagctatgtgagataatgggttaaagaaaaataaagcccactagatgtaatttcctgttattagcagcagaaggcatcttcattgaaatattcattccacacattttggttctaccttgtaattccacaccacgagtctcatataaaatgagaaaatcatttcctcaacttaggaaatgaggtctctttgttgcatctctgtgatcaaacagaacagacataattatcagcttaatatatttctataggatttatactcttacaggatttatatgtacttgtactgctacttatgtacaagtaacatataactaaaaataaaatatgcataaaaacttttgattgaaaataaaataacagtcgtctctgtcagtggagaaattatgctcaaatgattattactttgaaatagacctctgaattatgtacttttatatttgacatttcatactgactctcaggtagaacataatggagactccattctccgtcttctaaatgtgtctttctctgaaatctgtacaggtcctttgataacactatattattgaagtctctggagtgaaacactatacactaatttacagttataaatacaaaatattgtagatggggtgaagacttctgattgacttgctggctggtttctcatctggtttgccaagtttgtttcagttgttatagtctgttctcagtttttatgcactgcctttttaaatgttagcattacttttttaattgacaagtaaaaattgtatagcatatttatgtggaagcatgaagttttgttatatgcctatagtgtggaatgactaaatcatggtatttaacatatacattacctcacatactcatgacacacacgtgaaaatcattattctgttaggaaataatcttccctttttcttttcttttcttttcattttttgtctttggagccaaatggaccagatgatatttaactccatctttgagaaacatttaataatgtaatgtgtttgtggtacagggtgagtacagatgcacaggaggccatagggtttaggcaaaggggagcacaaaagttgaagatgaggcgctgccatcaatgctgggacttcaggccaagggcaggaactgaggaagccacaagggaggacattttctgcagttgctgaaccagtagcaactaggtcctgagaaagccctctctcgtggaagaataacagccaggcgggaaagcttttcatcctgcaaagctggggcagaagattcttccttaaattgtcatctgcacttcagctcaggaatcctgcaaaagacagaggagagtgttgttttcaacctggctctactaacgtttctttccccctctttgaaggactcagatgagaacactgcaggaagaagaaaaacaagttcctgagtctcccagagccaatagtcctgcagagcacaggccttttctaagtggagaggaggagttttggtgtaaattgcctgatcagaaatttggatccaaagtctttcctattatttctgtctcatgccttatcacctctaccatcattctagtgtgtcctgagtttgttccttccggtaggttcagggtctggctgacttcaagagtgaagccacagacccttgcagtgagtgttatagctcttaaaggtggcacggacccaaagagtgagcacaagatttattgtgaagatcaaaagaacaaaacttccacagcatagaaaaggacctaagcaggttgcaggtgctggctagggtgaccagcttttattcccttatttgtccccgcccgtatcctgctgattggtccattttaaagagtgctgattggtccattttacagagtgtggattggtccattttacagagtgctgattggtccatcttacaaacatctagcgagccacagagtgtcaatttttacagagcactcattggtgtgtttttacagagcactcattggtgcatttagaaacctcttgtaagacagaaaagttctccaagtccccacccaacccagaagtccagctggcttcacctctcactggagaaactgaatctgtgtctaaaagaggattaaaaggtattacctgttggctgaagtccagagtgtcctgggaaaaagaggaaaagatatacacttaaaagatattgaagcaaatctgtcctccaacacaatatcacagtcccagatctcccaccggagagttctaacaccaaaacccacaccaaccagggcagagaggagcagaaacagaccatgtgacccatgaagcatgaagtgtctgtcacaggatccagtgtaattccattaactttagtggctcttccttaatttgctccaagatctcaaaccaaaggacccctacttgttaaccttcctcttgtctctgcaggccacaagctattatgctttcacatagtaaccatgcactgatgatttctggattagcaggacattagagccgtttggggaaagaaaggctttattcagagccactcatatactgagaactaacctcagcaaagctctatttcctcctgcagaaaagcctatggaaaggcccagctaccaaaggctcctcacctttctgattcctgaagtagatgaacagcccggccccaaggaagagcaggcccagcacaaagcccccgactccactcagcatcttgctctgtgcagattcagaccgtgctcctgagagaggaagccaggtttagtgatgcttattccaaattgaacctctttaattgagactctaagattcagagctttgaaaatggggaagaaggctgccccacaagaactaaaataactagccattttgggagaaaaaaaggatttcaaatcacactgaacagttacaaggttccgacatcaaactcattcaaatattacagccttgatgtaaggcaagcgttcaacatctgatccacagaaagcctgagactcagtgaggctaagtagtttgtctagagtgacagagctaataaaaggcagagctgagattggactcccctcatgtcaggtaggcccctatgcttcccctcttcccagatcaaaacaagtaactcagagcagcagcaccagaaactcagtctcagacccagaagcagggcctggagcttggggagatcgggtgaccctgacctgtgacatcatggggaggttcaaaaaaaaaaaaagcatgactgattccacagggagtacaggtgtttctacacactgttacagggctatccccagtgacctgtgctgatggagatgagaacatggagcaaatgaaaataggacgtgggagaggagaaacctgacactcagggattagcacagtccccttcttggtgggtgagaaatgtatgaaatcagaaagctgctcactccattccactgtgagagcgctcgttacgcttgggtgctccacttggcaagtgtaaacctctccactccgaggaactgtttctagcatcaccagggtctggaaggtccagtctccattctggatcaggcccgtggacaccaccccagccttctcttcctggccgttccggaaccacctgacttcaatgctgcctggatagaaaccactcacagagcagaccaggaggttgtggtgctgcaggggctgggtctttgcaggatacacagtcacctgaggatggactaggagaaaaaaaggtagagggaatgagtcaggaagacagagtaattctgctggtttggctgtttgtctgcttctctgcaaacccaggctctgaccttgaccaggcctccagcacagctggccatgtggccttacagtgtcatcagcctggaatttaatcttgatagtgaggacccattagatttgagagatgtgaaaaattgcgtttgcttcttcataacttgaaattggcatgcattgtcaaagtgtttacaaatttttgaaagtacagagtgtagtaattaaaactgatacctgagccaggttgcatggttcaaatccaaggtctgccttttactggttgatcctggaagagttgattcttctgtgtctcaactttgtcacccccaatgaaggataattatactaatttacctcttggggttatatgaggattaatttatgtaaaatacataatgactgaagatagccttcaatttatgagatcagaaagcttctcactccattccaccgtaagggggctcatcacacttgggtgctccacttggcacctatttatcatccttgtacaccgtgacagaaaaatatgatttaaagcaatgtacatagacaaagggacagagttgggtacatgagaaaaccgagtatgaatttttaggaatactactgccatgcactcacaccttagaacaccacagaaatggttctgcccctgggaaggtgggacagacagaaatgattctccaaatttttacgttcctagaaaagcatgagtcctaaagcagacagaaggatttaggagcgtcattttagttttgaaagttcttatattttcattcagctgctcaatgtatcccccgtgcaacacaagcagaattattatcaggccaattgtaaaatgatttttctttccagaatcacatttggattaaggcagggtctggaactcattacttgtggtgcttatgcccaggaaaatccccgacattagcatactctcaataaatacaatgtttttagaagtaaggagaaacctagagacaaaaataccacaaaatggcagatttaagatggattgtaaatcattaataaaatttttgcaatacattttattaaataaaaatgttcaaattcttaacatggaaaagaattttcaaaatcaacatacaaaccacaaactggagcaaatgctgaatcaaatatcaataaagtgttaataatcttacagtacaaagaacccacaaagtcactgagaaaaatactaagccctagagatattaggcagtagatcattgtccattacctaccaaataaaatagggaattcttagagcagttattaaaattgaccaataaatcggtcaaaataattcaaaagaactcttttgaatgaaaaacagacctctccacattttttcaaatgaaaaaatataaattaaaaattaaccagaaacatacattttcaacttttggtgaatgtcataataaaggtcaacaaaggggaaagtgatccctaagttgtgtcacaactattatatataaaagaataatatgtaactactagaaaactattagcattataataatacagtaactgtgttaaaactttaattcaaaagttagtttcactgtcatttctactatgtaaaaatatacacactagaaaaacaaaaaactagcaagaaatttatacctaaagaagtttcagaggtgccttagaggtctactcaattcccctagaacttaatctaatgcttttacaaacagcacgcacttttatttcagagattacatgaagggtgtgtgccagggacagtctggaaccggcctcctcacattatcccaaaccttccttacccctcagctctcctcccctaaaccttcaccccacccacacacaccttacactttccttccctgcatctctaaggacccaggacaatcaaggtctcctctctctccagccgcccgcacccacctcccttgtcacctctccacagaagtctccaaggataagaagcagccccctcctgcttcccctcccacaacaggcacacagacacagaccaatccacactctacacacacacctgtgccttcataactgcttgctcgggattgagaggattctaaatgctcacagatggcgcgctccctctctctgtctcttcctctctctctctctctctcacacacacacacacacacacacacacactctctctcagatttccagctcacagggacccaggccccgccccccgacatgctcacctcgccgctgcactgtgaagctctcaccaaccccgtagttgtgtctgcagtaattgtccacccggccccgcttctgctccaggaggtccttctggctgttccaggactcggcgacaggccgccccagctccgtcaccgcccggtactcccccacgtcgctgtcgaagcgcaggaactcctcctggttatggaagtatctgtccaggtaccgcacccgctccgtcccattgaagaaatgacactcagacttacgcagctccaagaaacgtgctgcgggtacacgaaggatccggtcacacgggcggcctcctgagaagacactgacagcgacgccgccatccggggctccctgggtggggtgcgggcactgggaaccttaaccggccccacccgcaacgcccaccacctgcagcccaggagctcatcctccgttttcctcaggcgaacgggggcctaggggactatgcgggaaaaccccttctcatccccaggcttttgggaccccctccctgcctccagcttgttctggagacctccaagcaggagctggaggaggatccgccccgcaccgcagcccgccccgcctcctcctaggagcctccaccccaaagacactctgctccttctctcatcccacatgtttaccggttccttaaacagcacccaccgcgttcatcctgtgaacactttcttagtgatgaccttgtgccaggcctgcgctgcctctaggaatccaaacaagggaaaacagacctctccactccgctgggggagcttaaagagcagtgaaagcgatggccaaaaaccagacacacaagaggttagacaggaatgagaaatcccggaagtgggaagttctagagcagagaataataggatgatctcaattacattagggtgccagagaaggaccctctgaagagtgacagttcagatgtgacttgacaggttaagcaggtgtgagccagggggcagagtggagcccgtgtctgtttggacaaaacgggaggcacatttcaggtttaggaaatcccatgtacaaaagcttgaattgatgaacttcttcaaaaaactaggagaaagttcactaaagcagagaggctgaggggaaggagggtaaaaggttagcctggagaaatcacaagaagccaggtattgaaagcctcgtgggtggcgttaggattttggatttatagtaagacaatggtaaagtatcgaagagtttaaaggacaataaaaccatgatccctgtaaatgtccacaaactttcctttgcatttctaaattcacaaagctcagaaattcagtttaaaaaacttgtttccacaactcatttggcaaatcgcatctgataagggtaagtggtcaaaggtgtctcagagctcttattggcgacatgtgcttctgtagtttccatacatataaacatacatacatatatgtgtgaaaatagacacatatgtaaaacacagtatatatttttgatgtttttgtctttatgtttgaagtgtgaaaacgacaaaaataacttaaaaataatccttgggtaaaagtgaaatgagtacatagaagcattttacattgtgaataatatcaaatgtagaatcactacagaaatctgaggcatgttactgagaaataatttcagcagcatcactatttgtgacttacaagagcaagttgttggaagttaatagagatggtgatgaccaacaactcatgaaaatgttgaaaaatattgcataaggcaaaaactaaatatgaaaatattaagcttgcattgactaagtggattcaacaagaaagtggttgaatttatgcaactgtctaatttttttataatggaacaagcaaaaataaactataaaaaacaactgtgtggtgagtgtataacagatgtgagtgtagaattttcaaaaagagcacagcgtgaaccagtgctctcagcctcagcactattgacattttggaccagataattctttgttgatggcggaggctgttctgaacattgtaggttctctagcagtgttcctggcttctactcattaaatatcagaagaaacccctgttgtgacaaccaaaaattgttccaaacattgtcactgttccccaaggatgatgggagggaagggaggggtggtgaactatccctgggtaagaactacaggtgtgaaccatctgaaaaaatctgtgttgaacaagctactattagttatggagcagctgagaattgtattgaaaaatatttcttgaaaatcttggtcctaggtaaaaagaatgttttgtagaattctggtcccaatacagtgctatcttttcagaaaatgaacttgatgagaaccaagatttaatgatttccttgccttaccaagcagtcactaatcatatcatttatcattcacatcatcttttttcttaatttctccgccactggtccactaattatctatagtaatgaatcacaaccacagctattttattcccattaaatgccccaactaactcatttctctcagtctcccactcccaacaatgctagcaggcatcacatttccagccttggccagaggcagaactcttggttttgtagtcaagtcccctcagaaagggagaaaccaagaaaatgacattctgatacagacagtttcaaaacatgagcaggtccccagactgtgagcaagacctgcagaaatctccctttgccctttagaaacgatggcagagaggtgtccaccctggatcaaacaatgtctatctttttatccctaaattatctaagcactttcttacagagagaaagttaaaatgtaaacatgtgtaaagttgctgtcactgtggcttgcatgggtagcactgtaatccatgtccatgtgtcccacttagggttgacagatttggcaaataaaaccagagggtacccaattaaatttggatttccaataaattatggtcgtgtatctgaaatttagatttaactaggaacatgtgttttatttggtaactcttgcccaatttgctagtcaaacctcagaagaaggagtgatttaatacttccttgtgtttgtcaacgcatgaccattatagacatactgaacttttaaaatgataaatgcaaaatcattgaaagtttctcctatacattggaattagcagcccttgcatctctgtccccactcaaagaaacaacctggtatatatgaatatcagaaattctgtcaataattcagacacaatatagtcactactcactaatgatggaaaaactctcaaaccctacaatcagaaaatctgaataaaaaggtgacctcttctacttgggtcaatttttaccaaccgtaagcctttttgtaatatatcaaatgcatttaataatagcataatcctcacaggattactgttaagtgtaaaattaaatgatgactcttcttagcactgatcacataataaacactcaaatacattcccattttaacttttatgatccctataactgtagctcacattattttttgtattccttaattctaaagcaattagtatcttcatgattttgcaattgtcttctgttcttctatgagtttcataaagaattgtcattctgaaaacatagggcagaaacactggtttatgtctaataatgtagtatacctaaacctcacataaaaggcatctgctgacatagaagaaagggactttctatatgctcagatttaaactgcaatctgatttccagcactaaatttctaatactgggttttacttataacctctcaattttagattccagagatgtatatgtttttaaataccacagatacagcaggatcattattgaaattgcatacagaaattcacaggcctggtacacagtcactgcaaactgttacatggcatatactgatggcgagcggattcattttatttatcaccactctcatgacctagagtaataactggtatattctatgtcactaataaatattggctctgtgaaatactggctgtgttaaatattggctgtgtgaccttttgcatgagtagtcaccactgcacacaggggctctccagtatttccttgctaatgactgagcatctcttgttcacaggtcttcctccgtctctttagcttctttagccttttcctttagattcagcgggctccctgaacccagagcacagtccttcccgaagttctactcaaaacagtcaaccttaacctcgtcctcacttctactcactcttcaaatagtccaatccagtttcctccctggatactccattgactacaaatatcaactccaccaaacccagcacttgcttctctgtcacgttctcacttccccctctgcttagtggtactcaccacaattggcctctcccttctccctgaaaaaaatatattttccttgacttacacgcattatgttctcttggtttttctccaacatccctgggctctgtctcagcccactttgctggcctgtgccctcttcttttttctccacacaatccatctccctatgtatcctcttccactccctagaatttaacacactacacgtattgatgccgccaacataaatatctgacgccctagcctcacctcaccatgagtctcttaaatgccactgaccttctgattgctctacataaatgtcaataaatcatctctaatttaaacaaaacttttatttccaaccacccacttcaaatcatttcctcccacagtttttcctatctcaataaacaaaactaccacccacttatttgtcaaaacaaaatcctcaggaataaacttgattgttccaccccctttacagtaattcattaacaagctaagcaaaaatacatgccaagcctgtccactttatctttttcaccgtctttatcactaatgcactccatgaagccacaagcctgttttccctggagaattccctgctgtgctcctaaatagtcctcctaaccacttgtgaaccccaacaatccaatccccacaaagtagctagaattaattgtaataattgaatataagctgggcgcagtggctcatgcctgtaatcccagcactttgggaggccgaggcgggtggatcacaaggtcaggagatcgagaccatcttggctaacacggtgaaaccccatccctactaaaaatacaaaaagtagccgactgtggtggcatgcacctgtggtcccagctactcaggaggctgaggaaggataatttcttgaacccaggaggcggaggttgcagtgagccgagattgtgccactgcaatctagcctgggcaacagagtgagactccatcacacacacacacaaaagttgaatataaattgactctccttgtaaccatacagcagcttctcatatctatttaaataaaattcagtccgggggtggtggctcacgcctgtaatcccagcactttgggaggccaaggcagacagattatctgaggtcaggagttcaagaccagcctggtcaacatggtgataccccatgtatactaaaaatacaaaaaaattagccaggtatggtggtgggtgcctgtaatcccagttacttgggaagctgaggcaggagaatcacttgaacccaggaggtggaggttgcagtgagtggagattgtgccatggcactccagcctgggcaacaagaatgaaactccatctcaaaataaataaataaataaaatttaaaaataaataaaaataaaataaaattcaaattttttaccgtggacatcagagcctataatgatgaggctcctgacttcctctctgtgtcctacctcatcttctgcctctccatttccttgctttctatacgtcagcccttctagccttctttctctccctccacataatttcccacaccagtgctttccctcgattcggtctccctgaaactttcgtccgttagatcttcatgactgtctacttattttgttgtctcagctgaatatcactttctcaggtagagctccctaaacatacaaactaaagtagatgaatccatttctctctttcaacacacatctgatgtcttttcttcagtgcactatgactctctaacattatcttctttgttaaatgcttattgggttagtgtctgtctcctccactcttgtaacttccttgagagttgggaccctctctatcttaatcaaatagaatgatttgaacctagaatggaacccagtacacagtagctgctgagaaaaataagtgtggtttacacaaataaaccagggtatgggaactgatcactgtggggatcctggaaagcaagaaggggctcaagttccagcactctttcattttgatgtcacactagaccccttctcctcctggtgagaaatacaggcaaacttctttctccttcttctagttggaagaagaattcatggataaaggaacagtgatttaagaaaaaggaaatctttttattaagagtcatctcttttgcctgggcacactggctcacatctataatcctagcatgttgggaggctaaggcaggaggattgcttgagttcagcagtttaagaccagcctgggcaatatggcaaaatctcctctctaccaaaattgcaaaaattagctgggcgtggttgcctgcctgtattcccagctactctggagcctgaggagggaggattgcttgagtgtgggaggcagaggttgcagtgagcctcgatcgcaccactgagctacagcctgggtgacagaggcaggccctatctcaaagagaaaaatattatctctttcagtggatctcatagtgctaaggatctgtgcaagctttagagatttctggaaatgatgacaacatagttggggaaaaatagagagaaatgggaggaagaggtaagcagacatggctaattaaggaaagctgagggcatgatgggtgaacctatgaaactgaggacaagaccgcagtaagacaatgagtttccaggacttgcccattgactttcagccctatgagatgtgaacaatgtccacattgtctcggtaaccccacacagtatatagtttgaacattattaaatttctgatatttgattatttttgacttacaaaaatagaatttcatataatttatactacattagttaaatctcttctgtcatgtctagttagagcatgtaggagatgtaggagaaacaagtatagaaaggttaaaaagattcataataaacactaacctgggccagtttttcagaggatgccttaagttctttaggcaccaaagaatacctcataagtgctctgtatctgtaaggtgattccaagtactaatgatctcagcttcagttccagggatttttccccataagaaagaaagagcactaagtataacttctgtcagacaacctacatacactacagggatacaggctttataaacattggagttcagaaagaaaagaaaggagatactagggaggccactgggtccatcctcacatatgaggaagaggggccaacaccacaggtcctgtggaggacataacccaggatcgtctaggagagaccctttgaattcccttgactcccacaaaattttcagtaaaaacctccttttgtctgacataagtcaacataataaagggaattgctgtatggggaatttattttagcatccttatttccaaatcctctaaagaccctgagtacatgtgatgcaaaggttttattggtggagatttgagaagaaatggcctgtacaaaggccccttacacaagtctcatggagagggcaagtagccaagttccttttgtggaggaaataatttgcgatcccttgataaagatgagcaatctctgaagaaaacctcacaatttcttaagggacatggcctgggcacaatgttaacacaactccctatattcccccaccccatagtagctcagcaccctcaatgtgctcttacgtcgggtgtccccagcgaaagccagtcgggagctcagcaccatcagtgtcactgtcaacgctgccaagctggagcctccagggagcttcagacacaccatgctggagaagaggacaggaccaggggccagaggagcaggcaagtctcactcagggagaactatgacccccctccacccacattccaaattatagggaggaagttactgatttccttgctcctggattgggtaatctcgtgtcggagaaccaatcagcatctgagttcaacagcatcatcagttgctgctcagagatgctgtatgaaggtcctcttctgaaataatttcattctttaaaggattgttttaatttagtacttgaaaggtttgaaccagttgcatgtaaaacactttaattggggagctattgtgagccagctctgtgctggtcagtgatgtgttcacaagtttgagccttgtaagagcattcatttcccacttgacaagacaactgtttgcagaagtgagtgtgtgagtgtgtttaagagtaaaggagacggagggaacatggttgtaaatccggagtcctttaatcttgtctttattgtaccatatcttaatgtcacagatttgggaaaattacttcatgtctcacagttgaaatgaaggcactgcgatctttcaggtctttcaatactggaaaattctgtgattctctagatgcctcaaggagcggcagccccaggtatctgataatatgacagaatgacagctattgactagagagtgtaatatgtacctatttccaggtagtgatgtctttaataagttaaaggaaattgaaagtctgttaataatttaatctgagtaaaaatatctttttcaagcgtgtctcctgatgctgcccccaggtttagcggcacctccagaacacacacaggaatgggctaacaggggccacctatgtgcaatggagggtctgaaggtgcctttgtacggcacttaccctaacaatgtgataaggtcaagtgtgcaatccaggtattcgtgggtctgagagatcgatcaaagactctcaaagtcagccgttcacagaacaactcttttttttcttcttcttttttgagacagagccttgctctgttgccctggctggagtgcagtggcatgatcttggctcactgcaacctccgcctcctcggttcaaacaattctcctgccacagcctcccgagtaactctgactacaggcacgtgcctccacgcttggctaattttttgtatttttagtggagatggggtttcaccgtgttagccaggatggtctcgatctcctgacttcgtgttctacaccagcagtgtaaccccaaactgctggggttactggcgtgagccatcatgcctggtcacaattctgttttaaaataatgaatattttatatgaagagtgttcagtccctcattcctggttcccattatgatttcctcatttgattgaggctatagcactttactattatgtttctcttgttttatcataagggaggatataagacgactttgctaactaatacatttttgaatgttcaggaaagagaacactagggaaaactatgaattacatcagttgatgtaaccatataatattaaacatattatatacatttagataattattatgctttttattaatataaatgtaacatctaagattcagaatggacttcaaagtacaactatacttatagcgttctgcattaattcacatgctaccacataggcactcattccttataggccttagtgtttccaggggcaggattctcatcatgctgccgtaaaaatgagcattttactttatactcagaattgcactaagtgctttttatacttcatatttttatttcattctcacatcaactcactaaaataaatacccttttcatgcttacaggtagagagaataaaacaatggagatgaaacaacttttgcaaagatacaaagctagtaaatggtacactatagattgaaccaaattatatatccctcaggctcagccactatatcataatccttcacatcctatttctgagaataatgtcctatgtattaaaattatttatattcctataatttatggatgcacatagcaatatggctacttatgttaatgaatggcagcagtatacgatttgaggaagatactgtgtagcaattctagttccttcaaaagaatcacctcattatcatccttaccctcctctggaaatgacaacatttacatttatcttatgtgatgacacccatagctcctgagaagtctccttcttattaaaggtaacagtgacctcaaaattcccaaatataaactattgctcagaattattattgcagatttctcatcataaagtagtaaatttgatcatctcaaaacagaagaaaaaaagtgcctcacttactttggaaaaacatacttctattaatataaaaagttcaaaatttcatgggaaaaagtcactactgtccctggatttgagaataaactatgtctctataccacaataataattcaatactatgggaatttgtgaaattgcaaccagaatatcacatttaatttggtcaacagaaaataataatttacttagaagctaatttaatcccagctactcgggaggtgggtggattgcttgaacctggaaggtccacgctgcagtgatccaagatcatgccactgcattccagcctgggtggcagatggcagaccctgtaaagaaaaaaaaaaaaaaaggaaaagaaagaaagaaaaaaaaaggaaaagaaagaaagaaaaaaaagaaaagaaaagaaggaacaaactgtgaaaaaagaaactaattgagatgatggtaatctaggaaatctggctaaggttcagcttagtattttaggataaaagggtggtgatgctggcagtggtgagctgtccagagtggccgactgcagtgggaagttgcaagcggtggtggcaggaacgactgcgggagcagtggccatggtggaacccctgtgcctcatgtcccctgtgcctcacgtccctgaggcagctgactgtgatgccccaacccttgagcagctggcgggaccgcccccaggccaggagcctcccactcctgctttgctgctctcaccctgcagctgtggggagggcatggaactggggccaggcttgttgggcctggtttgggaagtgggagtggcctcgctttggggacccagccagcggcatggtcactgtcccacccaccctgctgaggaagcccagttcctgcgcctcaggaggaggttctgcctgaggtggcccagagcggtgtccctggggtggccaccaagcttgattttcccgacggccaggcttgggtgtgatctgctccaccaccccatccaggcaaggggaaccccgggcacctctgagtgctaggggaagaacttgcagacacatcatccttgccccagatgctggcatgggaacaggtgaggggagctgcccaccccaggctgtaagaaggtgtgacaggggctacctgcagactccaaggattgagtaggaatcctgccctccatgcagcaagatccaggcctctctgcactccacgctgtcaaggacgtgaagcacctcctgtccctgcaggcttgcaggtgtctgctcccactgcctggcctctcacctggcctctccaggctcccgggtgcctgctctgatctcagagtggagttggggccaagccccagtgctgttacagcctagctgggcgtgtgcatgctcagggcaaagttgacacaccagcctcctgccacctcagccacggggaagctgagggaagatgggctgagggcaactggtgctggcctacaggccccttgccatgagcagcctaggtgccatggatggcgctgggaggcagacagtctcctgggcagaagggggcaagtccccagtgaagcccctccttctggccagggagggtctgaaggctgtgggctgggctgccagtcctgctgacacgagtgggaacttgtgcattttctgggcctgccccatggccaaccatggtgcccactttctcccctctgaggcctgtaaaagccctgggctcaggcagagttgaacagaggatggagagagcagagagagaggccagggacatgagggatgagttgctgaggagaggggttaccctccccagggtctcctctcagctgcagagtgaagctgccctcaccagggtctcctctctgctgagaactgaggagaggacaggacaatcagctgcagagaggagccaccctctctgttgatagctgaacagatgtcggggcaacctggcagtggagaggagctgcccactgtggctctctgagctgttctattgcttaataaagctcctctttgtcctgctaaccctttacttgtctgggtacctcattcttcctggacgcaggacaggaacctgggatctgcctaatgatgaggctaaaaaagctgtaacacaaacaggttgtagatgagcaatagagaatgtagtcaaatgcagacaaacatggaatgaaaaagcaaaaataaatccatatcattccatgtaacaagaccattttttaaaagtagttttaagtggacagaaaaattgcagagaaagttcatggagggctgggcgcggtggctcacgcctgtaatcccagcactttgggaggccgaggcgggcggatcacgaggtcaggagatcgagaccatcccggctaaaacggtgaaaccccgtctctactaaaaatacaaaaaattagccgggcgtagtggcgggcgcctgtagtcccagctacttgggaggctgaggcaggagaatggcgtgaacccgggaggcggagcttgcagtgagccgagatcccgccactgcactccagcctgggcgacagagcgagactccgtctcaaaaaaaaaaaaaaaaaaaaaaagaaagttcatggagcccttcttccctaaagcagccttctgcttaatttctcctattcttaacatcctgcatcggtgtggtatacttgttaccactgatgaagcaatactgatacttgttgttaactgagatccatagtgaaattagggatcattcttattatacagttctatgggttctgataaatatattatgtcatatatccaccatttagtggaactgacccaagagtcccataggcagttttttttttttttaaataaacatagaaatggacacttctggtcttaaagcttgaaacttacatttgttttatttgagttcctttccaaaaaaatattctcccaggcctctcaaaaagtatcaaagaactggaactcaccagatcgtctcatctagtcaatgagactccaggttccccattcattatgattgctcccttacccctccctagttcctgttttctcatacataggtaaatttttccctgctagataaactcccaattttagtcagtcacagagatggatttgacactggtctcccatctcctcagctgcaccacctgattaaagattaaagccttcttctttggcaacactcattgtcatctcagtgattggctttctgtgtggtgagcagcaagacccagactgaagcccttgtgtgcaagacttagactgaacctctggtgtttcagtgacaaaattatcctatgaagtagtttcgctcacctaaaattgtcccaggctccacctactcatgcactcctcttcctcctgaatccctggaaaccactatttactgtcactgtatttatgccttttccagaatgttatatagttgtaatcatatggtgtatagttttttcagactggcttcttcacataacaatatgcatataggttttctccatgtcttttcctagcttgatagcttattcctctttaatgttgaataacaacccatggtatggatctaccacaatttatccactcacttactggaggacatcttggttgctttgaatttttggcaattataaataaagctgctataaacattggtgtacacttttttgtgtggacagaagttttccacttatttgggcaaatatttaggattgcaattgctgaatcttgtggtagagtatgtttggctttggaagaaacagccaaagtgtcttccagacaagccaggggaacagggtctggaggcagggaacctaaggccgtttcatgttgacatccgaatggaactaaactgaaaggaaaactcaaacttcctatgcctaagtagcagaaggatcaaagactactccctttgtaacccgccccccattttctgcgtggtaaatgtgaaattcaaagtacctctgattggttgttttttgcaaccagtcagatatttgcataggagtgtagctttgtaacttcatttcggtctctgattggttgcggaattgttttcctcaaaatttctacagcctagcgataaaaatcctagaaaagcaaaataagcacaaaccaaggtggcataaccttgtaagacttaatgaataaataacgagtttctttaccaatggtttagagaaagcagactcttgagaatgttgcaaatagaataagtgtttgctaacatatctataattttaatataaaataaataggtgaacaatagagaacacaattgtggggaaaagaaagagagatcagattgttactgtgtctgtgtagaaagaagtagacataagagactccatattgttccgtactaagaaaaattcttctgccttgagatgctgttaatctgtaaccctacccccaaccctgtgctccctaagacatgtgctgtgtcaactcagggttaaatggattaagggctgtgcagggtgtgccttgttaaacaaatgcttgaaggcagcatgcttgttgagagtcatcaccactccctaatctcaagtacccagagacacaaaacactgcagaaggccgcagggacctctgcctaggaaagccagatattgtccaaggtttctccccatgtgatagtctgaaatatggcctcgtgggaagggaaagacctgaccgtcccccagcctgacacccgtaaagggtctgtgctgaggaggattagtgaaagaggaaggaactcctctttgcagttgagataagaggaaggcatctgtctcctgctcgtccctgggcaatggaatgtctcagtgtaaagcccgattgtatattccgtctgctgagatgggggaaaaccgccatagggctggaggtgggacatgctggcagcaatactgctctttaaggcattgagatgtttatgtatatgcacatcaaaagcacaacacttttttctttaccttgtttatgatgcagagacatttgttcatgtgtttacctgctgatcttctctccactattatcctattgtcctgccatatccccctctccgggaaacgcccgataatgatcaataaatactaagggaactcagaggcccgtgccggcgtgggtcctccgtatgctgaacgccggtcccctgggcccatttttctttctctatactttgtctctgtgtctctttcttttccaagtctctcgttctacctgatgaggaacgcccacaggtgtggaggggcaacccatcccttcatacactcaaactcagacaagtatggaatgaaaagcaaaagtaagtccatatcctcccatgtaacaagaccatttttaaagcagtttcaagtgtacaaaaaactttcaagaaagtttagggagttcccacatacctccttccctaaaacagccctctgttcagtttcttctattattaacatcctgcattagtgtggcacactagtattaatgaaccaatactgatacttattgttaactgaggttcatagttatattagagttcactctattacacagttctatgggttctgataaatacataatgtcatgtgtttaccattaaagtgaaaccaatgcaatagtcccatagataattatttggataaacatagaaattattgtatggtaagtgtgtgtttagctttgtaagaaacagcgagtgtcttccaaagtggctatactgttttgcattcccaacagcaatgaatcagagtccccattgttctatatccttgccaacatttggttttgtgagagttttggattttggccaggaaaaaaaaagctttttaaaaatttttacttgaaaatcattatagattcacaggaaattggcaaagacagtacaaaggacgtatgcataccctttcacggagcttttccaaatgtttatgttaagcagctctagcacagtagcaaaaccaggaaactgacttcgatatgatatgtgttcatagttctatgcctgtgtcttatcatatttgcagatttatgtatccaccacgcaatccagtggagagctattccatcccacagagatctcccctcatgttgctttttagagtcacacactaatccctacacatcatcaccctgacaactactagtctcttctccaccaatctctataatagcgtcactttgaaaatgttacataaatagaatcacacagtatgtgacttttgtgactggcattttccccacagcataatgtccttgagatccatccaagttgttgcatgtatcaacaattttttttttttattgctaaggaatactccatcagatgaatgcactgcagtttaactatttgcctgttgagggacatttggctgtttctagttttggggttattacaaataaagctgttgtgaacatttgtgtaagatttttgtgtgaatatgtgtttttatttctctgatataaatgtctcagaatgttattcctgactcatatggcaaatatatgtgtagttcttcaagacactgccaaacaactttctagaagtgagaggtgaagccagctgggcttctgagttgggtagggacttggagaacttttgtgtctagctaaaggattgtaaacacaccaatcagcactctgtaaaaacgcaccaatcagcactctgtaaaatggaccaatcagctctctgtaaaatggaccaatcagcaggatgtgggtggggccaaataagggaataaaagctggccactcgagccagcaccagcatctggcttgggtcgccttctacgctgtggaagctttgttcttttgctcttcatgataaatcttgctgctgctcgctgtttgggtctgcactacctttatgagctgtaacatgcaccacaagggtctacagcttcattcctgaagtcagcgagaccatgaacccatcagaaggaagaaactccagacacatctgaacattggaaggaagaaactccggacacaccatctttaagagctgtaacactcactgcgaaggtctgtggcttcattcttgaaatcagcaagaccaagaacccacgagaaggaataaattctggacacatttggcaacccagatgggacacattttggcgaccacaaagggacacattttggcaccccacatgggacagtcacctatcgccaagctgtgagtaccttcagacccctttcacttgctattctgccctatttttccttagaatttgggggctaaataccaggcacctgttggccagttaaaagtgactagtgtggccactggactaaagacacgggtatcaggctttctgggaaagggctctctaacaacccttgactatttggagttgggagcattggtttgcatggaaccagcttctgcttttcctgtacttctgggctgagccaaaggtcaacagagaggaaagccattcagctcaggggtcccaacaacaagttggtcgacgctgcagccatgagcagaactctcaaagttacttgcctgagtgagactcgcctgtctatcctatctatcctgacccttgcccaagggtcctaatgcctgtcggacaaacttcctcttgcctctcttctctgaggtgagtcctgcttctaaaaaccactccctgtttctggaatttctagtttctcctataagaattatttctagtacaaactccaggactctattcccttctttaggcactcaggctcaccaatcagaaagacataatttttgcccaaaacctcattgggtggggagaccaactatccttttaggattcttcctcagactaacaggcttaacaaaagctattcctgaagctaggatatggggagcttcagaaatgatatcctttgtattcgagtgaggacaaaaggcatcactcttccaaccctggagatctcttctctccctcagggtgtggccctccatttcatttttggggcataacatctttataggacagaggtaaagtctcagtgttaacaggagaatgcttaggactctaacaagttttcgatcagtgcatcagtaagggccactaaatcctatttttcttggtcctctttgtgatctaggaggacaggcaagggtgaagtttttcgagaatgcgtctgtaagggccactaaatctgaccttcctcagtcctccttgtggtctaggaggaaaactagtgtttctgctgctgcgttggtgagtgcaactattccaatcagcagggtccagggaccgctgcaggatcttgggcaagaggtatttctgctcctgcattggtgagtgcaactattccgatcagtggttccagggaccattgcaggttcttgggcaagagggagaagcaaacaaaccaaaaccatggatggttttgtctttcagatgagaaacactcaggcaccaacatactcacccttgaaatgcatcctaagccattgggaccaatttgacccactaaccctgaaaaagaggtggctcatttttttctgcactacagcttggccccaatattcactctctgatggggagaaatggccacctgagggaagtataaatcacaatactatcctacagcttgaccttttctgtaagagggaaggcaaatggagtgaaataccttatggtatggggttatgtccccttcaagctgtaaggggaggggaatttggcccagcccaggtacatgtccccttctcactctctgatttaaagcagatcaaggcaaggcagacctgggaagttttcagatgatcctgataggtacatagatgtcctacagggtctagggcaaacgttcgatctcacttggagagatgtcatgctattgttaggtcaaaccccggcctttaatgaaaagaatgaggctttagctacagcccaagagtttggagatacctggtatcttagttaagtaaatgatagaatgacagctgaagaaagggacaaattccctaccagttggcaagccatccccagtatggatccccactgggaccttgactcagatcatggggactgaagtcataaacatctgctgacctgtgttctagaaggactaaggagaattaggaaaaagtccatgaattattcaatgatgtctaccataactcaggaaaagaaagagaatccttctcctttccttgagcagctatgggagggcttaagaaaatatactcccctgtcacccaactcaattcactagagggtcaattgatcctaaaacataagtttattacccagtcagccacagatatcaggagagagctccaaaaagcgagccctgggccctgaataaaatctagaggcattattaaacctggcaacctcggtgttctataatagggaccaagaggaacaggcccaaaaggaaaagtgagatcagagaaaagccacagccttagtcatggccctcagacaaatagaacttggtggttcagagagaacaaaaaatggagcaggctaatcacccagtagggcttgttatcagtgtggtttacaaggacactttaaagaagattgtccaatgagaaacaagcggcccccttgcccatgtccactatgctgaggcaatcactagaaggtgcactgccccagaggacaaaggttctctgggccagaagcccccaaccagatgatccaacaataggactgaggatgcctggggcaagtgccagctcatgtcatcaccctcactgagccccgggtatgtttaaccattgaaggccatgaaattggcttcctcctggacactggcacagctttctcagtgttaatctctggtcctggacagctgtctaccatccgaggaatcctgggatggcctataataaggtatttctcccacctccttggttgtaattgggagactttgctcttttcacatgcctttcttgttatgcctgaaagtcccataccattttagggagggacatattagccaaagctggagccattatctacatgaatatggggaacaagttacgcatttgtagcctcctgcttgaggagggaatcaaccctgaagtctgggcactggaagaacaattcagaagggcaaaaaatgcccgcctagtccaaatcaggctaaaagcccccaacactaatgaatgccttctcatcccctctttcaatcactctctcaaatggttcctagtagatacaaaactttttttctccaatgagaaaatagaacacagggagccactcagtttgctcccagcacccctttccagccactcaccggagctacattggcaagtactctaggagtatgggaaaatgaaaacaacaaactcacacacatttccacatacacaaccagttctgtctatccagccaaggtatattcttcttatgtggaatgtcaacctatatctgcctccccaatatctggacaggcatctacaccttagtctttctaagacccaacattaacattgccccaggaaatcagaccctatcagtacccctcaaagctcaagttcatcagcacagagccatacaactagtacccctacttatagggttaggaatggctactgctagaggaaccagagtagccagtttatctacttcattatcctactaccacacactctcaaaggatttctcagacagtttgcaagaaataacgaaatctatccttactctacaatactcccaaatagactctttggcagcagtgactcttcaaaaccaccgaggcctagacctcttcactgctgagaaaggagaactctgcgctttcttaggggaagaatattgtttttacactaaccagtcagggatagtacaagatgccacccagtgtttacaggaaaagtcttgtgaaatcagacaatgcctttgaaactcttataccaacctctggagttgggcaacatggcttctcccctttctaggtcctgtgacagccatcttactattactcgccttcaggccctgtatttttaacctccttgtcaaatttgtttcctctaggatcgaggccatcaagctacagatggtcttacaaagggaccccaaatgagctcaactaacaacttctaccaagaacccctggactgagccactgaccctttcactggcctaaagagttcccttctggaggacactacaactgcagggccccttcttcacccctatccagcaggaagtagctagagaggtcatcgcccaatacccaacagccgttggggtgtcctgtttagagtggggattgagagttgaagaccgctgggcttctgggtcaggtggggacttggagaacttttctgtttagctagaggattataaatacatcaatcagcactctgtgtctagctaaaggactgtaaatgcaccaatcagcactgtgtaaaaacacaccaatcagcactccgtgtctagctaaaggattgtaaacacaccaatcagcgctctgtaaaaaggatccatcagcacactgtaaaattgaccaatcaatactctgtaaaatggaccaatcagcaggatgtgggcagggccaaataaggaaataaacgctggccccccaaaccagcagtggcagccgctcagatccccttccaagctgtagaagctttgttcttttgctcttcacaataaatcttgctgctgctcactctttgggtccggactacctttatgaactgtaatactcactgcgagagtctgtggcttcattcctgaagtcagcgagaccacaaacccatcgggaggaactaacaactccggacgtgccactttaagagttgtaacgctcactgcgaaggtctgcgacttcactcctgaagtcagcgagaccacaaatccaccggaaggaagaaactctggacacatctgaacatctgaaggaaaaaactccggacacaccatctttaagagctgtaacattcaccgcgaaggtccgtggcttcattctggaagtcagcaagaccaagaacccaccggaaggaataaattccagacacagaaggatagtcccattttacattctcaccatcagtgtatgagaaattcagtttttctgcattctcagcagcatttaccattgtcatattttttagagattttagctgtattaagagttgtgtggtactattagatcaagttcttaatttgcatttccctgatggctagtgatttgcatgtcattcattgtgcttatttgccatgtacatgtatcctctttgataaaatgtctcttcatatcttttgcccattttgtaattaaattttttttatttttgagatggagtcttgctctattgcccaggctggagtgcagtggcacgatcttggctcactgcaaactctgcctcctgggttcacgccattctcctgtctcagcctcctgagtagctgggactacaggcactcaccaaaatgcccggctaattttttttttgtattgttagtagagacgggatttcaccgtgttagccaggatggtctcgatctcctgacctcgtgatccgcccacctcggcctcccaaagtgctgggattacaggcgtgagccactgtgcctggccacaattaaatgttatagtctgcactctgctatatattttatagaagagcttttatagttgattatatattttcgacaatgtattcttggtaatatatgtgttttaaatattttctccgtatctctaacttacttttcatttcttaacaggatactttacagaacaaaagttttaaactctgaagaagccttatttattgttttttttgtttgtttgtttttgtctttttgttttttacacgtagtgcttttgatgtcatgtctgagaactcagaattcagacagcaggccctaggttctgatgattttctcgtgttttcttctaaacgttttacatgtagacatgatttcattggggtaaatgttttcatacggtgtgagaatttgttatttctttcttgcttctgttttgttttttgtttggttttgtttttgtctatgaatttccactttctcctggaccattgtttgaaaagactgtagcctatattacctccattgaattattttgcacctttgtcaaaatgagttcgcatatgtgtatttctggattctctatgctgctccaccaatctatgtctatccctgcactaatgtcgatcagtattgattactatagctataaaaattctgaaatttggtaatagttatttcatctctttccctgtgaaatttttttttacctatgctagttcccttggttctccatatgcattttataataactttgtctacaactattacaaatcttgctggaatttagggagaaattgtgttaaacctcgatatcaaattgaggagaattgacatctttactatatttagttttctagtttatgaacacagtaaatctcttcatttcttcagatttttttatttatcagcatttcagcatatggattgtgtacatgttctgttggtatacttatgaggttttttgaatgaaaataattcatgttgtatttttagtatttgttttgatttctttattactgtatattcaaataaaattgattttttttgttgatcttgaattctgtgaccttgcgaatttccttagtagctgaagcagaagaggaaaagcactcagactttcactattaagtataatttagccgcaacgtttttgtagaagttatttatccagttgaggaggtcatcctcagttcctactattttgaggggtttttttaaatcataaattaatgttgaattatgtcaaaggccttttctatgtcaattgatataaccatgcgatgtttcttctttagcttcttaataagaaggatgacactgattgatttcaaacataaaccagacttgcgtccctaaaataaacgctacttggcatactttacatatatttttagtttggcagattttttacttgctaacattttgttagggagttttgcatgtatagtcatgcaggtatattgctttttaattttcttttgctgtactgtttttgtgtgctttttattttaggaaatgctggcctcataaagtaagttgggatgtcttcccctctcttctgttttctggaggaaattttgcagagttgtgttaattctactgaaatgtttggtagatttctcctgtaaaactattctaaactagagatttctcctataagttcagttctttttataattacagagcttttcaatttatctatttcatattgagttaattgtaatagtgtgtacttctgtacttttaaaggattcttttccatttcacctaagtgtttttggtgtattcctttggtgtactattgatgtcgaagaatctgtagtgatataatatgtttcaaccccaatattggtgttttttctcctttttccttttattttgtcctagaaatttgtcagttctattaatattttctaagaacaaactttttttccactaattttgtctctgcctcttttttttttttttttttgagacggagttttgctcttgttgcccaggatggagtgcaatggcgccatctgggctcactgcaacccccgcctcccaggttcaagtgattctcctccctcagcctcacgagtagctgggattacaggactgcgccaccatgctcagctaattttgtatttttagcagagacagggtttctccatgttggtcaggcttaaactcccgacctcaggtgatccgcccgcttcagccttgcaaagtgctgggattacaggcgtgagccaccgagttctgcctttatatcagttttttttttctccttcttcttcttgctttaggttatttttgacaattttccagatttttgaggtgggaactgagattattggtttctgaggttttctctttttcagtgtatacattttgtactatgcatagtagttcaaattactcctttagctatgtgccaaacattttgatatgttgtattttcattatcacttagttgaacatactttttattttcttaagacatctttttttttttgagatggagtctcgcactgtctcccaggctggagtgcagtggcgtgatctcagctcactgcaagctccgcctcccgagtagctgggactacaggcgcccgccaccacgcccggctaattttttgtaattttagtagagatggggtttcaccgtgttagccaggatggtctcgatctcctgacctcgtgatccacctgcctcagcctcccaaagtgctgggattacaggcgtgagccgccatgcggcgtctccagctggagtgcagtggcgccttgtcggctcactgcaagctctgcctcccgggttcaagtgattctcctgcctcagcctcccgaatagctggtactacaggcgcccgccaccacacctggctaattttttgtatttttagtagagacggggtttcagcatgttggccaggatggcctcgatctcttgacttcgtgatccacccacctctgcctcccaaagttctgggattacaggcatgagccacctcgccaggccctttttttttttagatggagtctcgctctgtggtccatgctggagtgcagtggcgcaatctcccctgactgcaacttcagccttcccgtgttccagccattctcgtgcctcagcctcctgagtagctgggattataggcaagtgccactacgcccagctaattttttttgtatttttggtagagctgggggtttcaccatgttggtctggctgctctcgaacaactgacctcgtgatccacccgcctcagcctcccaaagtgctgggattacaggcgtgagccaccacacctggccaagacattttttgatccaagggtaatttaaatgtatgttactaagtttccatgtgtttggagttatactgattttcttcatgttactgatttctggttcagctccgttgcttccagggagcacagtctgtatgatttcaattctttacatttgttgaggttccttttatggtccagggtatgagagatgttggtaaatattccatggacagttaaaaaatgtgtattcttctgtctggtgtggtggtctgccaatgtccattagatcttattggtggatagttttgttgggtttcattatcttgctgagtttttatccagttgttttattaacttttcagagttggtttgtggagtcccaaagtttaactgtgtatttgtctatttctccttccagttctgaccattttttgctctacttataagtaacttagttgtatggtgtacatacttttagagttgctatgtcttctttctgaattaacatttttatgattatgtagtgtttctgtttgtctctcagaatattctttgctctgtgcattttatgttatctgatattatagccatttctgctttctttgacaaaagtaagtacgattttttttttccattcttctatttcaggcttccactcttgtaatatttgtggtaagtttctcataggtagcatatcagcgggtcattatgtttcactctgacatttgtctttttagacaatttacatgtcatgcaattattaatatgtgaggtctcatgactgccatttggtttttgtttcttctggtttttgcttctctgttttctttccctgtttttcgatgtgtcccttaagcaatatttagaattccattttttaatcaatcactttttggtgtatcacattgtagagtttttgtgttttatctatctattaacgtaacttacagtctacttgtgctgagattttttcaatttgactacagtgtaaaaactttacctttttatccctttcactcctgcatttataatatatattttttattttctctacttgcatcaaaacccagatctgacaatgtcgtaatttttgcctcaaccatcaaactaatttataaaactgaagaagagaagtctgttgtattgacccatatctttactcattctagtttctttttttcctgattgtccaagatttcttcccttaccatttctattccagttcaagcacttcctttacccttgttttaggataagtctgctagcatcaaattctcttgattttccttcctctaagaatgtcatggccgggcgcagtggctcacacctgtaatcccagcactttggaaggccgaggcaggtgcatcccctaagctcaggagtttgagaccagcttgggcatcatggcaaaaccctgtctctgccaaaaatacaaaaagttagccaggcttggtggtgtgtgtctgtaattccagctactcaggaggcagaggtgtgaggatcatataagcctgagaggcagaggctgcagtgagccatggatgtgccacttccctccagcctgggtgacagagcaagactccatctaaaaaacaaaaaaaaaaagaaaagaaaaaaagaatgtcatgatagaaccttcattttataataatatttttctggatgcacattctaggttaacattactttcagccattaaaatatcttgtggcacttctctctggtctgcatgatttctaatgaggaatacactgtcatttaatttatttcctcctgtacatgagatgtcatttctctcttgttgctttcaagattttttgacataaatttctttggatttatcttcctttagatttgcacagattcttgaatttttactttaaagtctttatccaaatttggaaaatagtcaatcttccttcaaagactctttgggcatcacccatttgtcatctttctctaagactctagagacacaaatttcatatctttttttatagtcttacagatttatcagcatgaaataatactgaatattatgaataattttacaaaaacaaatttgcatgcaatgaataaattactcaaaatgtgcaatgtactgaagctaacaaataacataaaatatgaagagttccacatctcatagagaaagccaattctataaagctttcccaagacaaaaccccaggttcatttagcttcagtaaatattttaaaatatttaaggaacaaacaacactaactttatgcaaacttcaaacatttgaaaaagtggaaaacacttgcagttaggtttgatgagatctgtgtaaaatttacttcaagatctgaaaagaactctacaacaaataggaatttatggaccaataattcttatgagccaagttcttaagaaaataatagccaactgaattcattgatataaaagatggctactacattatgaccaagtggagtttattccagaaatgcaaggttgtttgagcatttgagaatccattagtgtgattcactacattaactgaaggagggagaatacacatgcaaccacctggatagagtcttgaaatatgatttgacagaattcagcacttggccttaattttttaaaaatctatttgcaaacttgtattaaaaagttatttcttcagtctgagaaatgatagtaaccttattgcacatattagtctcagccgtgaaatatttaaaactgtctccttcatatctggagtactagaggagttaggcaatgaaaacggcaagaaaaataaataaaagagatgataattgcatccaggtgaaatggtcattatttactctcaacataatcagctacttggaaaataaaattagtaaacaaactcatagttttaataagtgaatttaaataatgttgctgaatacgaagtcagtatacattaaagcaattatgttattgatatagtttggatgtttgtcccgtccaaatctcgtgttgaaacatagcctccagtgttggaggcgaggcctggtgagaggtattttggtggggggcagatccttcattgatggcttggtgccatcttagctgtaatgcatgagttctcactcagttcacaggagatctggttgtttaaaagagtgcgactcttccccactttctctgtgctcctgctctcaccatgtgatacccaggctcccctttccttcccccatgattgttagcttcctgagggccctcaccagaagcaattgccagcaccacacctcctgtacagcacgcaaaaccctgagccagttaaacctcttttctttatgaattacccagcctcaggtatttctttttagcaatgtaagaatggactaacacaataatgttctaccataaacaaatagaaaacaaaaccaagaaaataattttatcaatttcctcacctctttgtttttttgttgtggttgttttttgtttttgagacagagtcttgctctgtctcccaggctggggtgcaatggtgtgacctcggctccccacagccaccgtctcctgctcacaagcgattctcctgcctcagcctcttgagtagctgggattacaggcatgcaccaccacgtccggctaatttttgtatttttagtagaggcagggtttcactattttggccaggctggtcttgaactcttgaccacgtgatctgcccacctcagcctctcaaagtgctgggactacaggcttgagccaccatgcacagccctgtttttgtttgtttgtttgtttgttttttagacggagtctcactctgtcgcccaggctggagtgcagtggcgcgatcttggctcactgcaacctccacctcccggcttcacgccattctctgcctcagcctcccaagtagctgggattacaggcacctgccaccatgccctgctaatgtttttgtatttttagtagagacgaggtttcaccatcttggccaggctggtcttcaagtcctgacctcgtgatccacccgccttggcctcccaaagttctgggattacaggtgtgaaccatcacacctagcaacaatgtcttatttttttaaaaaagaattattttaacaggtttactgaagcataatttacatactgcaaaatttactcattgtctatataaaatttaatgattttagtaaattaatggatttgtgcaattatcacaatgatccagttttataacatttctatcgtgtccaaaatttatctgtttatagttaattcccgccgataccccaagtcctaggcacccaatgatctgctgtttgtgtctataatttaccttctctagatattttaagtaaatgaaatcatacaacatgtaatcttttgtgtctagtttccttcacttagttaacattattgaagtttaccagttttgtagtatgtatcatcaattttgtttcgtttcttttcattcctttttattcatgttgtcttctttcatttgtgtgaatttataaggtacaagtgtagttttgttacctgcatagattgcttagtggtgaagtcagtgtttctgcagtatccatcaccccaatcacgtgcattgtccccattaagtaatgtctcatcatctggagtgcaaggattgaaacttgccttgggaaaactaccctcatgttcatggtatctcccctgccatataagtctatttttgtccccttttattgttgaatgatattgccttgcatggatgtagtaccattttgtttatccatttactagttgaaggatatttggattgttttcagtatgggcctactatggctaacgctgttctgaacactcaaacacatatctttgtgaggacatatgtttttatgtctcttaggtagattccaaggagtgaaattgctgggtcatatggtaaatgtatgttaaacttgctaggaaattgccaatttccaggtatttgtaaaattatacactcccaccagtactacataagggtttaaaaggtctgtttgtcttcaaacataattataatgttgatgatactattagaaataacatctgtcagccgaacacggtggctcacgcctatagtcccagcattttgggaggccaaggcaggcagatcatgaggtcaggagttcgagaccagcctgcccaacacagtgaaaccctgtctctgctaaaaacgtaaaaattagccaggcacggtggcatgcacctgtagtcgcagctactcagtagggtgaggcaggagaatcgcttgaaccaaggagtcgaaggttgtgcggagcagggaacacaccactgcacttcagcctggacaacagagcgagaccccatctcaaaaaagaaaaataaataaataaataacatctgtcttgttaattttatattttctctttatgtttcaatttttatttatccaggatctatttagtgaaaaaaatgagtttggagtacaccttaccaaaaactgaaactaaatctcaactctttctaattctagactctgttttactagtatttaatgaaaaaaaaatcagtaacaaatgcctttttaaaaataaatgtatagtgtgttttaaaacagcaccttacagagctagtcattcctttttctgcttttttttcaaaaatttccctagaaaatatatttacctcataaaataacatgtcagcatacttgagttctaaaaacaatcctttttacttgcttttttgttttattgtaattgagttaatggctgacatttaatactcaatgtgagtatattatatatgtttatatgtttttaaaatatatatatatttaaatatatgtataataaatatatatgtatttaaaaagacccagaaaccctgaattgaggatgcctatcgggaatctctaggccttcacgtggaatttaactatgaatactaacaacctaataataccacaatctttcattgccctacccagaaatcaatctctcctactccatccaccatttctttatttttaaaaatatatgattttgctctttttcttcccatgtgcatcaggcccactctacaaaggttgaatcctggcttatctgagcccatgtgatcccacggtcattccattgtttgagaaagtgggtactgggaacactctagaaactgtttagtagattcttataaagacacacaggaaaaagtcatatccttttcctgcctttgggagttgtgaaagaataagaaaactaaagctgctgcaggggtcctcctaccatctcaggaaagctgacgtgctgtgtgtgatagagagatgagctatgaagttccagaatcgctgatgatgacactggcctgctgagttgagcaaccctgatgatgcccagacttggatgtatcggcaatatgagataatgggttaaagaaaagaaaagcccactagatgggatttcctgctatttgcagcagaaggcatcttcattcagatattcatcccacacattttagtactaccttagaattccacaccacaagtctcatataaaatgagacaaatcatttcctcaacttaaggaacaaagcatatttgtggcaactctgggatcaaacagaataaacataattatcagcttagtatattcctataggatttatattcttataggatatatacatacatgtattgctatgtatgtacaataacatgtaactaaaaacaaaatatgcataaaataaaccttgaatttgattgaaaataaaataacagttgtctctgacggataaattatgttcagatgattattactttgaagtaaacttttgaattgattatgtactttcagatttgacatatttgatgctgactctcagatagaacacaatggagaaccctccatcttctaaatttgcctttctctgaaatctgtacaggtcctttgataatactatataactgaagtctctggaatgaaaaactatatactaatttaaaggtatagattcacaatatcgtagacggggttaagaaaaagttctgattgacttgctggctggtttctcatctcatgtttgacaagtttgtttcagttgttatagtctgttctcagtttttatgcattgcctttttgaacattaggtttacttttttaattggaaagtaaaaattgtatattatatttatgttgtagagcatgaagttttgatatatgcctatagtgtggaatgtctaaatcaagctatttaacatgtgcatttacctcatatacttattatatatacatgaaaaccattattctattgggaaataatcttccctttctcttgttttttgtccttgcagccaaatggaccagataatttttaactctgtttgagaaacatttaataatgcaatgtgtttgtggcacaaggggagtacagatgcaggggaggcaggaaagtttaggtaaagagaagcacaaaagttgaagatgaggcgctgccatcaaagctgtggggcttcaggccaagaacaggagctgcggaagccacaagggaggacattttctgcagagttgctgaaccagtaacaacctagtcctgacaaagctcttgtggaagaataacagccaagtgggaaagcttttcatcctgcaaagctggggcagaaggttcttccttgaatgtggtcatctgcacttcagctcgagtcctgcggagacagaggaaattgttttcagacctggctttactaaaacttcttttccccgctttcaacgactcagatgagagcactgcaggaagaagaaaaacaagttcctaagtctccctgagccaatgatcctgcaaagcacaggccttttctaagtggagaggaggagttttggtgtaaattgcctgatcagaaatctggatccaaagtctttcctattatttctgtctcacgccttatcacctctgccatcattctagggaaaccgaatctctttctgaaagaagattaaaaggtattaccttttgggtgaagtccagagtgtcctgggaaaaagaggaaaatatatatacttaaaaggtatggaagcaaatctgtcttccaatgcaatgtcccagccccagatctcccacctgagatttctctaacaccacaacccccaccaaccacggcagagaagagcagaaacagaccatgtgacccatgaagcatgaggtgtctgtcacaggatccagtgtaattgcattagccttagtggctcttccttaatttgcttcaggatctcgaagcaaaggacccctacttgttaacctttctcttatctctgcaggccacaagctattatgctttgacatagtaaccatgcactgatgatttctggattatcaggacattggaggtcatttggggaaagaaaggctttatccagggccactgatatactgagaactaatcctagcaaagccatatttcctcctccagaaaagcctatggagatactcagctcccaaaagctcctcacctttctgattcttgaagtagatgaacagccccgtcccaaggaagagcaggcccagcacgaagcccccgactccactcagcatcttgctctgtgcagattcagaccgtgctcctgagagaggaagccaggtttagtgacgtttattccaaattgaacctctttacttgagaccctaagattcagagctttcaaaatggggaagaaggctaccctgtaagaactaaaataactagctgtttctgggggaaaaaacgtttttcaaatcacactgaacagttacaaggtccaggcatcaacctcattcaaatattacagccttgatgtaaggcacaacttcaaaatctgatcaacagaaagcctgagtctcagtgaggttaagtagtttgtctagagtgacagagctaataaaagacagagctgagattggactcccctcatgtcaggaaggtcgctgcagttctcctcttctcagatcacaacaaacaactcagatcaaaagcaccagaaacacagtctcagacccagaggcccagagcccagggagaccgcgtgaccctgacctgtgctatcatgtggaggttcaaaagagggacagcctctcctgcgtggcaggtatgactgcttctccaggaggtacaggtttctagaaacctgtttctagaaatcgtttctagaaacctgtttctagaaatcgtttctagaaacctgtttctagaaatcgtttctagaaacctgtttctagaaatcgtttctagaaacctgtttctagaaatcgtttctagaaacgattacagggctacccccagtgacctgtgctgatggagatgagaacatggagcaaatgcaaataggatgtgggagaggagaaacctgacactcagggattggcacagtccccttcttggtgggtgagaaatttaggaagtcagaaaactgctcactccattgcactgtgagagggctcgtcatgcttggatgctcctccactccgaggaactgtttccagcatcaccagggtctggaaagtccagtctccattctggatcaggcctatggagaccaccgcagccttctcttcctgaccattccggaaccacctgacttcaatgctgcctggatagaaaccactcacacagcagaccaggaggttgctgtgaggcaggggctgggtctttgcaggatacatagtccccttaggttggactaggagaaaaacaggtagagagaatgaatcaggaagttagagtctcgttgttcagctgtttgtttgcttctctgtaaacccaggctctggccttgaccaggcctccaacacagctggccatatgccctcacagtgtcatcagcctggaatttaatcgtgatagtgtggacccactagatttgcgagatgttgtaaaaattttatttgtttcttcatagcttgaaattgtcatgcattatttaagtgtttacaaatctttgaaagtacagagtgtattaattaaaactgatacctgagccaggttgcctggttcaaatccaaggtctgccttttagtggttgatcctggaagagttttttgattcttttgtgtctcaactttctcacgtataatgtaggttaaattatactaatttacctcttggggttatatgaggattaatttacgtaaaatatataaaacaatgactgaagatagccttcaacttatgaggtcagaaagcttctcactccattccattgtgagagggctcatcacacttgggtgctccacttggcacctatttatcatcctcttacaccttgagagaagaatatgtcttaaagcaatgtggatagataaaggcacagagttgggtacatgaggaaaccgagtatgaatttttaggaatagtacctccatgcactcacaccttagaacaccagagaaatggttctgcccctgggaaggcgggacagacagaaatgattctccgaatctttatattcgtagaaaagcctgagtcctaaagcagagatttaggaattaaggaacgtcattttagttttgaaagttcttacattcacatttagctgatcaatgcatctcctgtgcaaaacaagcagaaatgattctccaaatatatatatatatatatatatatatatatattttttttttttttttttttttttgagatggagtctcactctgttgaccaggctgaaatgcagtggtgccatcttggctcactgcaacccccgcctcctggattcaagtgattctcctgcctcagcctcctgagtaggtgggactacaggcggtaaatccaccagatctttccaatgtcctttttctggggatttccataacactttcggaaaacctcttctctttttctctaagagtggccaatgtctttccactggagtcttaacatccgtaccaggagtcaaaaaatttaaagtaaataaggctaaatataactttgattgcagtggtaacttgtctcctactcctccgttttgtcttttcaacatgtgttgtaatgtttgatgtgcctgctctataatgccttgtcctctaggattataaggaattcctgttttatgggttatgacccaaagctacaggaaattttgaaaagcatgactagcataagcaggtccattgtcagtttttaattgtttaggtatccccatatgagcaaatgatgacagaaatgttgccgcacatgaccagctgtctcagctgtttggcatgtagcatgcagcatatgagaataagtgtctataggcacatgaacatagctaagcttaccaaaggctgctatgtgtgtaaatccatttgccaaatttcatttagagccaaacctcgtggattacatccttctacaggtgtggctccagggacatgctggcaagttggacacgactgtattatagacctagcttggctgtgaggcaagctaaacgtacaagtaagggcagaagtgttttgatgcagtaatacatgagaggtttgagcttgctgaaacacagaaccaatcaatttatttgctctatcattacctagagatagggctccaggaagttgtgtgtgagagcaaataagagaaaaatgaaaaggagctgcacaagaccgaatagtttgttgaagtcttaggaaaaaattaagcagttctggttctagggtacttttaattgtagcagtttctatgcaactggctacatttacaacataagctgaatcacagacaatgttgatagcatctgaagctgtgagctgtaaaacctgtatgactgcaatcaactctgagtattgagctgaaaccccagaggtcattattgtttgagtatgcttgggtccataaacagctgtaccacctttggaagagccatcagtaaaataggtttgtccacctggaataggcttgtgatgagtaatcacaggaagaatgaaagaatagactttataaaactgcacaattttgtctgaaggatggtgaaagcaaaggtttctgtggctgtagctgggaggcatgccgttgctgaagcatctgttccacaggctgtaactcagcttctgcctctttggtcaattgctgcggggaatctaatgaagaatctccttgtagggtttgagaaggttgtgtcagttgataagtggcaatatctagcattgggtgcagccaattaatatcccctaacaactgttgaaaatcatttaaagtctgtaacctgtctttaaggagaactactttttgaggccgtacacgtctttcagtaacaatattatctaagtaacgatatggcgaagttgtttgtaccttttctggagctatttttagattccatttagttaaagcctgctttgtttctcagaataactgatgtaagatttgatctgtaggagcagccaaaagaatgtcatccataaaatgaatgatgtaagcagtaggaaacatatttcgaggctcctttaatgcctgtcctacaaaatgctgacataacgtaggactgttaagcatgtcttggggtaaaactctccattgatagcaagaaagaggttctctttgattaatagaaggcacagagaaggcaaattgaggcttatccttctcatgtaatggtatagtgaagaaacaatccttaagatctattactgcaagaggccaatctctaggaatgaccactggagttggcacaccttgctgtaatggacccattggtttaatttgtgcattaatagctctcaaatcatgcagcagtcgccatcttccagacttttttggaataacaaacactggtgaattctgggggctaactgactcctctatatgtcctgtgtccacttgttcttatactagctgctgaagttgtgtcagcttctcctgagataggggccattgatccacccatacgggtttgccattggccattctaatggtgaggcagagggtggaggagaaatatcaatgaccgccatcagaaatcctgatgtcatagcccttttctatctgtttttccagttattgatattgggttaggttttcctcgtaggaatttccctaaacctttcccactctgatatcccatgtctttcaatgttttaaatcctgggttatcaaagttttcatttgtaagtctcatattcaatgctgtaagtaagtctcgatcccataaattgattggtatatttgcaacataaggctaaaaagtacatgactgtccatccggaccaagacaagataaaatctcagcactctgttgaacacttttagccactcctactcccactagggatgtggaggttagtttgagagaccatactggaggccagtccttactggatattactgccacatcagctcctgtatccataagcccataaaatttctttcttttaatttgtactacacaggtggatctattagaggctatgggctgggatagatagatttcccatgtagttgtgcttccaaaccctttatttcctcatttctccttttgtggagaaggatgtaatttgcggggaataagcaacaactgagcaatatattctcccagttcaaaaacccaaagacattttgacattaaaactacttgaatttctccttcataatcagagtcaactactccagggactacagtcatgccttgcaagttaagggggcttttacctaaaattagtcctatgtatcctgttggtaaaggcccccaaatgccagtgggaactttggtaggtttgtctcctccaactaatgtagttctttctctggtggggagatctaatcctgcacttcctggtgttcctgaggtgaggaataccaggaatcaatctttctcctgggacccatccctgaagtgggcctgtggtctgaactggaaatgccctcgttgtttgaggggcacgcgtacaggcccccttctagtttcccgacaggtgggtgctgttttcatgaaattttgaatggctgattaccccagtgacttccttggttacagcgaggacaaagtcctggtgttttttctgctaggtggggcactgcattgtaagttcctttctgtcctgagatctggcggcattcctttttaaaatgtccagtttttccacaattataacattttcccattttagggtttgacccttggctccttttacatttgtcaactgctaaattagccattgcctgcgctaatattgtagagcaatgaagctcagttcccacaacctgacaggctctgagaaaatttcccaagttttttatacacctcacaggtgccaatgcacgtttacaatctgcgtttacattctcaaaagctagagttaaggttagcatttctgcagcatcggtatgaggaatctgatgcttcattgcatcttgtcatcatgcaagaaattgtgcacaaggttcctgcaacacttgcatgatatgtaaaaaggattgcactgggactccctcttctggaattgtggccctgtcgcatttagcagcctatgcacactgctggcatttgggagtgccatttgatgttccaggtctgaatagggccattacctaacagcatgtcctctgtaatgtctctgtgtccagctacacgattctgtctagcattgtctgcacacatttcttgccaatttaaattcaatgtcaggtatgcacaaggagacaaacaagcatgagctgaatgctttccatcaaagggtagaaggcgcacagcaccaaatacaggttctagcagtcctaaagtgaatgggctctgtataccattgtttaccacactcattttaattccttcaacaacttaaactctagtggagtgtgttcatgagtgagctgctatggattatttggatcaggccttacagaaataggaaaagtgcaaggtcctatgggctctttagccatggcagcagagtgtaaaatgctctgtattggggtctctatttctgctaccgaaggaggcggtacagatgtttctgctattggaggaggcagtataggccaatttttttcctccctctcctgttttttattttaaattggagctgtgagtggtacaacagattctttcagatttttagactcagaacatcactcctactgtccagcagaataagaaggagataatggcagaaggacagtacggactaaactccaagtggagaaaagagaaggatcaactttgagacctttttgatgagcccattttaatccttctgctctgtcccaattttccatatcaagagtgcctgtctgtgggaactatgggttatgcgtaataacctcctgcagcatttttgttaatgtctgagatctaacctgagcaccagattgtttcaacaaaactttaagcaactgcacataatgtttttcttcaatacacaaattctgccccatgttaccctgattcagaaaactttctgttcccaatacttctttagaacactgaccttatattgctcccagtacctctttagggcactgaccttatatctgctgccagcagactcatcccggggtccccatacgtcttgtcaatttcagttcctctgctccagcagaccttctttgttcacatcctcgtgtccctgtgttgtgaaaccactatggcgttgccctgtcgctgtttgaatgtcactatgccatggaccctgttggactgaacaaaggaggacgaacggggggaataaagacaagagagttcatttggaagaaggggtcgggggcaccttgctcttagtgaacaagggccctgaactttgagctttctttgttgaaagaagctcaacaaagtgaaaagagatagtgagaagggggtggttgttggtctgctgcttgctccagagcagccttgcaagactgcattcctcgaacaataggctctagatgtcccagtagataaactcaaggagcccagtgccagggagtgattgccctcagcaaaacttctggcggccagcaaagaagagagtttgcccctattctgtattcctgataaacagtttgctgtttgatcatatagcatcagtggaatgctgagttggtcacgattctccggcctccggttctctacaccaaatggattcaacaagaaagtggttgaatttatgcaactctgtagttttttctaatgaaacaagcaaaaattaaccataaagaaatgattgggtggtgagtgtataaaagatatgagtcaggccgggtgcggtggctcatacctgtaatcccagcactttgggaggctgaggtgggcggatcacgaggtcagaagatcgagaccatcctggctaacatggtgcaaccctgtctctactaaaaatacaaaaaattaggcaggcgtggtggcgggcacctgtagtcccagctactcgggaggctgaggcaggagaatggcatgaacccgggaggtggagcttgcagtgagccaagatcccgccactgcattctagcctgggtgacagagtgagactccgtcacagaaaaaaaaaaacagatgtgagtctagacttttcagaaagagcacagtgtgaaccagtgctctcagcctgcactattgacattttggaccagataataatttgttggtgatggaggctgttgtgtacattgcaggttctctaaaagtatccctggcatctgctcattaaacatcagaagaaatccctgttgtgacaaccaaaaattcctccaaacattgccacacattccccaagggtgatgggagggaagggagggttggcgaactatccctgggtaaaaaccatgggtgtgaaccatctgaaaaaaatctgtgttgaacaagccactattagttatggagcagctgagaattattttgaaaaatatctgttgaaaatcttggtcctacataaaatgaaaatattgtagaattctggtctcaatacatgctatgtttccagaaaatgaacttgtggagaaccaagatttactgatttccttgccttaccaatcagtcaccaaatcatatcatttatctttcatagcatcttctttcttaatttctgtgccactggtacactaattatctgtggtaatgcatcacaaccacagctattttattcccattaaatgccccaacaaactcatttctctcagtctcccactcccaacagtactagcaggcatcaaatttccagccttggccagaggtagaactctcggttttgtagttaagtcccctcagaaagggagaaaccaaaaaaatgacattctcatacggacagtttacaaaaaatgagcaggtccccagactttgagtatgaccttcataaagcttcctttgccctttagaaaagatgccctggatcaaaaatgtctgtctttttattcttaaattatctaagcactttctttacagagagaaagttaaaaaataaaaatgtgtgaagtcactgtcactgtgacttgcatggctcgccctgtaatccatgctcatgtgtcccagttagggttgaaaggtttgacaaataaaaccagaggatgcccacttaaatttggatttccaataaattatggtgtgtatctgaaattcagatttaactagggacttgtattttatttggtaaccccaggccaacttgctagtcaaacttcagaacaaggagtgatttaatacttccttgtgttcttcaacatatgcccaggagagacatatagaacttttaaaatgataaatgcaaaatgaatgaaagttttgcctatacattggaactagcagcccttgcatctctgctcccacttcaagaaacaacctggtacatttgaatatcagaaattccgtcaataattcagacacagtctggtcactactcactaatgatggccagactttcaatctctagaatcagaaaatctgaatggaaacatgatctattctacttgggtcaatttttaccaaccataagcctttttgtaatctatcaaatgcatttaataatagcgtaatcctcacaggatttttgtttgtttgtttgtttttgagacggagtctcgctctgtcgcccaggctggagtgcagtggcgtgatctcggctcactgcaaactccgcctcctgggttcaccccattctcctgcctcagcctcccaagtagctgggactacaggcacccacgaccaagcccggctaatttttctgtatttttagaagagacggggtttcaccatgttagccaggatggtctcaatctcctgacctcgtgatccaccctcctcggcctcccaaagtgctgggattacaggcttgagccaccgcgcccggccaggattatttttaagtataaaattaaataatgatttttcgtagcactgaccacataataaacagtcaaatatatttccattttaatttttatgatccctttaactgcagctcacattatttttcctattccttgattctaaagcaatttgtatcttcatcatgattttgcaattgtcttctgttcttttattagtttcataaaaaattgtcattctgaaaacatagggcagaaacactagcttatgtctaataatgcagtatacctaaacctcacacaaaagggatctgctgacataggagaaagggactttctacatgctcagatttaaactgcaatctgatttctagcactacatttgggatactgggttttatttacatcttctcaattttagactcctgagatgtatatgtttttaaacactacagatacaataggatcattgttgaaactgaatactgaaattcatagacctggtacacagttactgcagaatgttatatggcatgtactgatggagactagatttatttcattcatcactccattctcatgacttagagtaataactggtatattctaagtcactaataaatacgggttgtgtgaaatattggctgtgtgatgttttgcatgagcagtcaccactgcacacagggaccctctcgtatttccttgccattaatgactgagcatctctggttcacaggtcctcctgcttctcttcggcctctttagccttttcctttagattcagctgtctccctaaatccagagtgcagtccttccctgaagctctctactcaaaacagtcaaccttaacctcatcctcacttctacttgctcttcaaatggtccattccattttccatcctggatgctccattgactgcagatatcaactccagcaaacccagcacttgcttctctctcacattctcacttcacccacttaatgatactcattggcttctccccgcttcttgaaaaaaatctgttttccttgacttacaagcattatgttctcttggtttttctcctacatccctggggctccctctcagtcccctttgctggcctgtgccttcttcttttttctacacacaagctattaccctatgtatcctcttccactccctggaatttaacagagtacacgtattgatgccatcaacataaatacttccagccctggactcaccgtgagtctcttaaattccattgaccttctgattgttccacataaacgtcaataaatcatttccaaccacccacttcaaataatttcctcccacagttttccctatctcaataaacaacaccaccatccacttatttgtcaagacaaaatccttaggaataagcttgattgttctatcccctttacagtaatccattaacaacctgagcaaaatacatgccgagtctgtccacttcatgtttttcactgtctttatcactaatgcacaccaggaagccatgagctgttttccctgaggattccctgctgtgctcctaaaaagtcttcctttttacttgtgaaccccagcaatccaatccccacaaagtagctagaattagttttaaaaattgaatataaattgactctccttgtaaccatccaatagcttcccatatctgtttaaataaaattaaaatttcttactgtgaacatcagggcctaatatgatgaggctcctgacctcctctctgcatcctacctcatcatctgcctctccatttccttgcttcctttacgtcagtccctctagccttctttctctccctgcatataaattcccacaccagggttttcccccaatttgtgtctctctggaacatttgacccttacatcttcacatggctgtttacttattttgttgtctcagctgaatgtcactttctcaggtagagctgcctaagcatatgaaccaaaattgggtgaatccaattctctctttccacaaacctgatgtcttttcttcagtgcatgatgactctctgaaattttcttctttgttaaatgattattgggttattgtctatctcctctatgattgtgtaacttccatgagtagggaccaacccactctatcttactcaaatagaatgatttgaacctagaagggaggccagtacacagtagctgctgataaaaataactgtggtttacatgaataaaccagcattctcggaactcatcactgtgtggatcctgaaaagcaagaaggggctcaagctccagcactttttcattttgatgtcacactagaccccttctcttccctgtgagaaatacaggcaaacttcttctttctcctcctcctagttggaagaattcacagataaggaaacagtaatttttttctttttttttatatttgggacagagtctagctctgttgccaggctggagtgcagtggtgtgatctgggctcactgcaacctctgcctcccaggttcaagcgactctcctgcctcagcctcccgagtagctgggattacaggcaagtgccaccacgctcagctaattttttttatttttagtaaagacgggtttcaccatgttggccaggatgatctcgatctcctggcttcgtgttccgcccacctccgcctcccaaagtgctgggattacaggcatgagtcactgcaaccggccaaggaaacagtaattttaagaaaaaagaattttttgttgttgttgttaagattcatgtattttcagcagggcacggtggttcacatctgtaatcctggcatgttgggaggtaggaggatcacctgagcccaggagtttaagaccagccttggcaatatggcaaaacacagtctctgccaaaattacaataattagctgggtgtggttgcctgcctgtagtcccagctactctggaggctgaggagggaggatcacttgagctttggtggcagaggttgcagtgagcctctatcacactactgcactacagcctgggtgacagagccaggctctgtctcaaaaaaagaagaaattatctcttgtgataaacctcatagttctctgggtctgtgcaagctttaaggatttcaggaaataatgacaacatagctggggaaaaacagagagaaactggaggaagaggtaagcagaaatggctaaataagaaaagccgagagcatgatgggtgaacctatgaaatttaggacaagacccgagtaagagaatgagttcccaggacttgctcattgactttcagccctgtgagatgtgaacaatgtccacattgtctcggtaactccactcagagtatatcgtttgaatcttagcaaatttctgatatttgactatttttgacttaacaaaaatagaatttcatataatttttcctacattgactgaatctcttcttgtggagtctagttagagcatgtaggcgaaggtaatatacaaaggttaaaagagattcataataaacactaacctgggccgggttttcagaggatgccttaagttctttaggcaccaaagaacaccccataggtattatttgcctgtagggtgacgccaagtactaaagatctcagcttcagttccagggatttttccccataagaaagaaagagcagtaagtataacttttgtcagagaacctacatacgctacagggatacaggctttataaagattgtgcttcagaaagaaaagaaaggagataatggggaggccactgaatacatcctcacatatgaggaagaggggccaataccagaggttctgtggaggacataacactggatcatctaggagagaccctttgaattcccttgactcccacaaaattttcagtaaaaacctccttttgtctgacataagtcaacataataaagggaagtgctgtatggggaatttattttagcatccttatttctaaatcttctaaagaccctgaggacatgtgatgcaaaggttttattggtggagatttgagaagaaatggcctgtacacaggccccttatatggagagggcaagtagtgaagctccttttgtggaggaaataatttgggatccatatgataaagatgggcaatccctgttgaaaacgtcacatattcttaagggacatggcctgggcatagtgacaaatttagctccctactttacccactttatagtagctcagcacccacagtgtgcacttaggtcgggtgcccacagccaaagccagtggggagctcagcaccatcagtgtcactgtcagaggtgccatgcaagagcctccagccaggcagcctgaggcacaccatgctggagaacagcacaggaccaggtgccagggtagcaggcaagtctcacattcatggagaactatgacccccaccactcacatcccaaacatagggaggaagttactaatttctttgctcctggattgggtaatcccgcgttggagaaccaatcagcatctgagttcagtatcatcatcagttgctgctcagagatgcagtatgaaggtcctcttctgaaataatttccttctttaaaagattgttttaatttagtacttggaaggttcgacccagttgcatgggaaacactttaattgggtccttattgtgagccacctctgagctggtcagtgatgtgttcacaactttgagtcttgtaagaacattcatttcccacttgacaacagaagtatttgcagcagtgactgtgtttaggagtaaatgagatggagggaacatggttgaaaatcaggacacctttaatctggtccttattgcaccatatcttaatgtcgtagatttgggaaaattacttcatgtctcacagttgatatgaaggcaccatgatctttcaggtctttcaatactggaaaatgctgtgattctgtggacgcctcaagtagcaacagcccctgggtatctgatgatatgacagaatgacagctgttgactggagagtgtaatctgtacctatttccaggtagggatgtccttaataagttaaaggaaatggaaagtttgttaataatttaatctgagtaaaaggttttatataaagtgtgtctcctgatgctgcccccaagtttagtggcacctccagagcacacacaggaaggggcttgcagggaccacctatgtgcaatggagggtctgaaggtgcctttgtatagcacttgccctaacaatgtgataaggtcaactgtccaatcgaagtattcaggggtctgggagatcggtcaaggactcaaagtcagctgttgacagaacaactctgtttcaaaataattaatattttacgtgaaaagtgttcaatccctcattcccggttcccattaggatttcctcatttgattgaggttatggccctttactattatgcttcttttgatttatcataagggaagatataagaagactgtgctaagtaatatgttacagaatgttcaggaaagagaaccctagggaaaaactatgaattacatcagctgatgtaatcatgtaattttagacatataattctacatttagataattattatgctttatattaatataaatgtgacatctaagattcagaatggacttcacagtataactgtacatgtaaaactctgcattaattcacactgtaccacagttctgatgggcactccttccttatgtgccttagtgtttccagaagcaggattctcaccatgctgcaataaaaataagcattttactttgtactcagaattgtattaaaagctttctatacttcatatttttatttaattctcacatcagctcagtaaaataaacacccttttcatgcttacaggtggagagactacaacgatggagataacacaacttttgcaaagatacactagtaaatggtacactgtagatagaaccaaattatatacccctcaagctcagccactagatcatactccttcagaaagaaggagaaaagaaaaagaaacacacaaaaaagaaacaaattatgaaaaaaagaaactaattgtgatgatagtaatctaggaaaaccagctgaggttcacattagtattttaagataaatggtgatgctggcagtggtgagctgtccagagtggccggctgctgcgggaagttgcaagcggtggcggcagcatccactgccggagcagtggccgtggtgggactcttgtaccccatgtcccctgtgcctcgcgtcactgaggcatctgactgcactgccccgacccttgagcagctggcgggaccgcccccaggcccagagccttcaccactcctgcgttgctgctctcaccctgcagttgtggggagggcatggagctggggccacccttcagtggcctggggtgggatgtgggagtggcctcactttgaggaccaggccagcggcaaggccactgtcccaccctgccgagggcgcccagtttctgcgcctcaggaagaggctctacctgaggcctcccagggttttatctccgcgggtggcgaccaagcctgatgctcctgacagccaggccccggctgggatctgttccccaaggtgcctcccccgccatatcccggcgagagagagcccggggcaccctgagtgctacgggaataatttgcagagacatcacccttgccccatatgccagcctgggcccagcggggggagccgcgcacctcaggctgccagaaggtgtgacaggggctacctgcaggctccacggaatgggttggaagccccgccctcccggccctcccggccctccctgcaggcagcaggagccaggcctctctacgctctcaaggctgagaaggcccccctgtccatgcaggcttgggggtgtctgctcccactttctggcctctcccttggcctcacccgggtcccgggtgcccactctgatctcagagtggagttggggcaaagccccagtgctgtcacagactggctgggtgtgtgcacgctcagggaagtgttgacacaccagccttttgccacctcagtcacagggaagccaagggaagatgggcaggtaatatttgcagtaagtttcttataggaagcatgtcgatgggtcattgtttttcactctgacatttgtctttttacacactttacatgtaatgcaattattaatatgtgagctcttatgactgccatctgctttttgttttcttttttgtttcctttggttttttcttctctggtttcttttcctatgttccaatgtgttccttaagcaatttttagaattccatttttaaatcaatcattttttggtttatctcattgtatagtttttgtgatttatctatctattaacataacttatcatagtctactggtgctgacattttaccaatttgactaaagtgtagaaactttgcctcctttatatccctttccacttccgcatgtataatatatatttttaattttctctacttgcatcaaaaccacatctgtcaatgttgcagtttttgcctcaaccatcaaattaatttacaaaactgaagaagtctgttgtatctaaccatatttttactcacttattgtttacttttttcccaattatccaggattccttccattatcatttctattccagttcaaacacttcctttagcccttgttttaacataagtctgctagcatgaaattctcttgattttccttcctctaagtgtgtcatggccaggcatggtggctcacacctgtaatcccagcactttggaaggccaaggcaggcagatctcatgagctcagggattcgagactaccctgggcaacatggcaaaaccctgtctctgccagaaatacaaaaaattagccaggcgtggtggtgcgtgtctgtaattccagctattcaggaggctgatgtgtgaggattacaggagcctgggaagcagaggctgcagtgagccatggtcgcaccactgccctccagcctgggtgacacagcaagactccatctaaaaaacaaacaaaaaaagaaaaaaaagaaaaagaaaaaaaaagaatgtcatgatggaacattttataataatgtttttactggatatacattctaggttaacattcttttcagccattaaaatatcttgtgccacttttgtctggtctgcatgatttctattgaacaatccactgtcatttaatttattttctcctgtgcatgagatgtcatttctctcttgttgctttcgagattttttttggcataaatttctttggatttattttcgtttgggtttgcacagattcttgaatttttacatttaagtctttgtccgaatttggaaaatagtcagtctttcttcaaacactctttgtgcatcacccatttgtcatctccctctaagactccagttacacaaatttcatagcttttgttatagtcttacagatttatcagcatgaaataatactaaatattatgaacaactttacaaaaataaatgtgcatgtaataaataaattattcaaaatgtacaatgtactgaagctgacaaataacataaaacaggaagagttccacatgtcatagagaaagtaagtccattctataatgctttcccaagacaaaaccccaggttcatctagcttcagtaactatttaaaaatatttaaggaacaaacaacactaactttatacaaacttcaaacatatttgaaaaaaggaaaagcacttgcagttacgtttgatgagatctgtgtaaactttacttcaagacctgaagggaactctacaacgaataggaattaagagaccaataactcttatgagccaagttcttaagaaaatgttagccaagtgaattcagtgatataaaagatggctactatatcacgaccaagtggagtttattcctgaaatgcaaggttatgtaagcatttgagaatcaattagtgtgattcactacgttaactgaaggaaggagaatacacatgcaaccaccttgatagtcatgaaatatgatttgacagaattcagcacttggccttaatttttaaaaaatctgttttcaaacttgttttaaaaaaatatttctcaatctgagaaatgatagctacccaattgcacacattagtctcagcagtgaaatgtttaaaactgtctccttcatatctggagtactagacgagttagagaatgataacagcaagaaaaatatatcaaagagataattgcatccaggtaagatggtcattatttactcttgacataatcaggtacttaggaaataaaaacaatagacaagctcatagatttaataagtaaatttaagtaatgttgctgattacaaagtcagtatacattaaaccaattattttattgatatagtttggatgtttgtcccctccagatctcatgttaaaatgtaacctccatcgttggaggtgaggcctggtgagaggtattttggtcggggggtggggcagatccttcatcaatgacttggtgccatcctagctgtaatgagtgagttctcactcagttcacatgagatctggttgtttaaagaagtgcgactcttccccactttctctgtgcttctgctctcaccatgtgatacctgggcccccctttccttcccccataattgttagcttcctgaggccctcaccagaagcaattgccagcaccacacctcctgtacagcctgcagaaccctgagtcagttaaacttcttttcttcatgaattacccaacctcaggtgtttatttctggcaatgtaagaagggactaacacaattatgctctatagtaaacaaataggaaacaaaaccaagaaaataatgttatcgatttcctcacccctttgcttttttcttctacttttttcaacttaaatttgtttctttttattattaagttaaaagtttacacctttgatttttacatatttatctttttataatacaggcatttaaaactaaatatttttctctaaggactgccttggttgcatctcgaaaattttaaaaattcattgtagtattattttatttaaaattattttctaatttccttctgatatcctctttgacaagccacagattatttagaaatgtattattttacttccaaaaatttaggcagttttctcaatcttactaatttgtaatttgataagattgtgttcagagaatatactctgggtgattttattcttatgaaagtaattaagactagttttatagtcatagtatgtgttccatttcatggataatctttgtgcaatgtaaaaaaataaatattctgtagttatgagatgttgtcaatttatatgtcaattataaatgccaaataagtcaagatggttgaaagcattgttcctatcttgatttccttcctgatctttgtttgcacaaagctacagagatgttcgttgtcttgtatctacctccttagttcccacagcaacagtatgaagtcagaaaaagttctggaaggagaatcagctgacagggcaaagtagatatgtattattcaggggccctctatagattgtaatgcatcacacaagcccacagcgttatttacaactcagctggtttgtctttactccctcacaatctccctttctcagccaggctcaatcttccacccatgttaagattcagtagatagaccaaagaataagagtggacacttgaccctgctcgcatatgtggaatttgttcatctctggaatttggaatttttatactttttgatccacagctggttaaaattttaaaaataagattattttccagtttatccatttagtttagtctatatgtctttttgctcttatggtaacagtgacaattctcataattttccatctcctaactggcattatggtttatgatttttttccaatccatgttgatagtcctacataatttacttaaagccctgaatattattgctttctgtggttataccacagtttaccttttttctatctaaatgtagagagtgtttcttttctcccctgttacattttttatatgtcatcatggacatatgaggaaaaatttaccgagactgtaacaatccagagtggaaatactgtattatcccaactactcacagggttacaccaatatatgctcacagtgccccacacagcaccaaatgtcatcctgcagtggcagtgtgctgtcacttcacatgctgcatagtttttaggatgtacaaaatttttataatcaagacaaattaatcagtttttctttttgaatctggaaatgtttttgttattccaaactgtggctcaacaaacgaccaattttatgtctccttgggctcatgtacgattgttctttaagatggatgtttagaatgggatttttgttgctttcatcaagcgtgtgacaattgtattttgagttttaatagatactactacactgccataactcaaaatcctaataatatgagagagtctattcccttagaatcttctaaatccttgagtttaaaacaaactattgtacttgttaattttggagtaggagaactagtttattacattgctgttcgaatttggatttttctgttcattggtgagtttgagcaaatatttatatttatcgactattaggaaattctcttctatagtgagtctatatcctttgcccaattgtctatggcatttccatgaatttatttattgatagttaacaatttttcataagaaagttagcccattgtctgccttacgtgatcaaaatttttcctgagcgtcatatacttcttttaattttgttattttcttcatgcaatgaaatcagtaattttcttcaaatattttttcatttgtgtcttctggattttgtcttgcttacgaagtcttattttttaaaaaagaattattttaacagatttactgaaacataattttcatactacaaaattcactcactgtatatgtaaaatttaatgatttgagtaaattaatagatttgagcaattatcacaacaatccagttttagaacatttctgtcatgtcccaaatttctctatttatatttaagtcccactgagaccccaaaccctaggcacccaatgatctgccttttgtgtacataaatttaccttttctagatatttcaagtaaatgaaatcacacaacatgtaatcttttgtatccaatttccttcacttagttaacattattgaagttcacaagttttgtggtatgtatcatcattttgtttgttttcatttctttttgtcttttttcatttgtgtaaatgcataaggtaaagtgtagttttggtacatgcataaattgcatagtggtgacgtcagtgtttctacagtatccattacccaaatcacatgcattgtacccattaagtaatctcatcatctagagtgcaagggttgaaacttgccttgggaaaactatcctcatgttcatggtgtctcccctgccagataagtctagttttgtccccttttattgttgaatgatattgccttgcctggatgtagttgaattttgtttatctgtttactagttgatggaaatttggattgttttcagtttgggcctactacggctaaggctgttctgaacacttgaacacatatcttcgtgaggacatatgtttttctgtctcttaggtagattccaaggagtgaaattggtgggtcatagggcaaacatatgttaaactttttaagaaattgccaaattatcaggtatttgtagaatcatacactcccaccagcaacacataagaaattagaaagtctatttgtcttcaaacataattataatgatgatgatagtattagaaataacatctgtcttgtgaattttatattttctctttatgtttcaagttttatttatccaggatttatttagtgaaagaaatgagtttggaatacaacttacaaaaactgaaactaaatctcaactctgtttctaattctagactctgtcttactagcatatttaatttaaaaaaaagcagttacaaatgcatttttaaaagtaaatgtatagtatgttttagagctttatagagctagtcattccttattctacttttttttcaatttccctggaaaatacatttacctcataaaataacatgtcagcataaattgagttctaaaaacaattctgtttgcttttttgtttgattgtaattgagttaatggctgacatttaatactctctatatgtgtgtgtgtatatacacctatatatacatatatacgtgtgtgtgtgtgtgtgtgtgtgtatgtatataaagacccaaagccctgaattgagggtgcctatcaggaatctataggccttcgtgtggaagttaactcaaatacttacaacctgatagtaccacaatctatcatttccctatgatgaaatcaatctctgctactccatccaccatttctttgtttttaaaaatatatgattttgctccttttcttcccatgtgcatcaggcccactctacaaaggttgaatcctggcttgtctgagcctgtgtgatcccacggtcattccaatgtataagaaagtgggtactgggaacactctggaaacagtttagttgctccttataaaggcacacaggagaaaggagtatccttttcctgcctttgggagttgttgtgaatgaataacaaacctaaagctgctgcatgggtcaccctaccatctcaggaaagctgacgtgctgtgtgtgatagagagatgagctacgaagttccaggatcactggtgatgacactggcctgctgagttgagcatccctggagatgcccagccttggatctatcggctatgtgagataatgggttaaagaaaaataaagccactagatgtaatttcctgttattagcagcagaacacatcttcactgaaatactcattccacacattttggttctaccttgtaattccacaccacgagtctcatataaaatgagaaaatcatttcctcaacttaggaaatgaggcctctttgttgcaactctgtgatcaaacagaacagacataattatcaacttaatatatttctataggatttatactcatagggtttatatgtatgtattgtgctgctacttatgtacaagtaacatataactaaaaataagatatgcataaaaacaagttttaatttgattgaaaataaaataacagtcgtctctgacagtggagaaactatgctcaaatgattactttgaaatagacctctaaattatgtacttttggatttgacatttcatactgactctcagatagcacataatagagaatcctccgtcttctaaatttgtctttctctgaaatctgtacaagtcctttgataacactatattattgaagtctctggagtgaaacactatacactaatttacagttataaatacaaaatattgtagacggggtgaaaaaaagttctgattgacttgctagctggtttctcatctcatggttgccaagtttgtttcagttgttatagtctgttctcagtttttatgcattgcctttttaaacattaggattacttttttgattgacaagtaaaaattgtatagtgtatttatattgtacagaatgaagttttgatatatgcctatagtgtggaatgtctaaatcaagttattttacatatgcattacctcacatactcatgacatatacatgaaaatcattattctattgggaaataatcttccttccctttttcttttcttttcattttttgtctttggagccaaatggaccagatgatatttaactccatctttgagaaacatttaataatgtaatgtgtttgtggtacagggtgagtacagatgcacaggaggccatagggtttaggcaaaggggagcacaaaagttgaagatgaggcactgccatcaaagctgtggggcttcaggccaagaacaggagctgaggaagccacaagggaggacattttctgcagttgctgaaccagtagcaaccaggtcctgagaaagccctctcttgtggaagaataacagccaggagggaaagcttttcatcctgcaaagctggggcagaaagttcttctttgaatgtgtcatctgcacttcagctcaggaatcctgcaaaagacagaggagagtgttgttttcaacctgactctactaacagtttcttttcctctctttcagggactcagatgagagcactgcaggaagaagaaaaacaagttcctgagtctcccagagccaatagtcccacagagcacaggccttttctaagtggagaggaggagttttggtgtaaattgcctgatcagaaatttggatccaaagtctttcctattatttctgtctcatgccttatcacctctaccatcaattctagtgtgtccagagtttgttccttccggtgggttcgtggtttcgctgacttcaagaatgaagccgcgaatcttcacagtgagtgttacagctcttaaaggtggcacagacccgaagagtgagcaacagcaagatttattgtgaagagcaaaagaacaaagcttccacagcatggaaggcgacctgagcgggttgctgctgctggctggggtggccagcttgtattcccttatttgtccccgcccatgtcctgctgattggtccattttaaagagcattgattggtccattttacagagtgtggattgctccattttacagagtgctgattagtccattttacaaacatctatctagccacagagtgccaattggtgtgtttttacagagcactgattggtgcatttagaaacctctcctaagacaggaaagttctgcaagtccctacccgacccagaagtccagctggcttcacctctcactagggaaaccgtatctgtttctaaaagaggattaaaaggtattacctcttggctgaagtccagagtgtcctgggaaaaagaggaaaatatatacacttaaaatttatggaagcaaatctgtcttccaacacaatgtcccagccccagatctcccaccggagagttctctgtcactacaacccacaccagccagggcagagaggagcagaaacagaccatgtgacccatgaagggtaaagtgtctgtcacaggatccagtgtaattccattagtcttagtggctcttccttaatctgctccaagatctcaaaccaaaggacccctacttgttaaccttcctcttgtctctgcaggccacaagctattatgctttcacatagtaaccatgcactgatgatttctggattagcaggacattagagccgtttggggaaagaaaggctttattcagggccactcatatactgagaactaacctcagcaaagccatagttcctcctccagaaaagcctatggagagagccagctaccaaaggctcctcacctttctgattcctgaagtagatgaacagcccggccccaaggaagagcaggcccagcacaaagcccccgactccactcagcatcttgctctgtgcagattcagaccgtgctcctgagagaggaagccaggtttagtgtttattccaaattgaacctctttaattgagactctaagattcagagctttgaaaatggggaagaagtctgacccacaagaactaaaataactagccatttctggagaaaaaaaggatttcaaatcacactgaacagttacaaggttcagacatcaaactcattcaaatattacagccttgatgtaaggcaagagttcaacatctgatccacagaaagcctgagactcaatgaggctaagtagtttgtctagagtgacagagctaataaaaggcagagctgagattggactcccctcatgtcaggaaggcccctacacttctcctcttcccagatcacaacaaataactcagatcaacagcaccagaaactcagtctcagacccagaggcagtgcctggagcccggggagggtgggtgaccctgacctgtgacatcatggggaggttcaaaagagggacagcctctcctgcctggcaggcgagactgcttctccaggaggtacaggtgtttctagaaacacctacagggctacccccagtgacctgtgctgatggagatgagaacatggagcaaatgaaaataggatgtcggagaggagaaacctgacactcagggatgagcacagtccccttcttggtgggtgagaaatttatgaagtcagaaagctgctcactccattccactgtgagagggcttgtcacgcttgggtgctccacttggcaggtgtaaacctctccactccgaggaactgtttccagcatcaccagggtctggaaggtccagtctccattgtggatcaggcctgtggacaccaccccagtcttctcttcctggccattccggaaccacctgacttcaatgctgcctggatagaaaccactcacagaacagaccaggaggttatggtgctgcaggggctgggtctttgaaggatacacagtcaccttaggatggactaggagaaaaaaggtagagggaatgagtcatgaagacagagtaagtctccttgtttggctgtttgtctgcttctctgcaaacccaggctctgaccttgaccaggcctccagcacagctggccatgtggccttacagtgtcatcagcctggaacttaatcttgatagtgaggacctattagatttgagagatattgtgaaaaattgtgtttgtttcttcatagcttgaaattgtcatgcattgtcaaagtgtttacaaatctttgaaagtacagagtgtagtaattaaaactgatatctgagccaggttgcctggttcaaatccaaggtctgccttaagagtttgattcttctgtgtctcaactttgtcacctataatgaaggataattatactaatttacctcttgggattatatgaggattaatgcatgtaaaatatataaaacaatgcctgaagataaccttcaatttatgaggtcataaagcttcacactccattccactgtgagggggctcatcacacttgggtgctccacttggcacctatttatcatccttgtacaccttgacagaaatatatgatttaaaacaatgttgatagataacgggacagagttgggtacatgacgaaaccgaatatgaatttttaggaatactaccgccatgcactcacaccttagaacaccacagaaatggttctgcccctgggaaggtgggacagacagaaatgattctccaaatttttactttcccagaaaagcatgagtcataaagcagagagaaggattaaggaacgtcattttagttttgaaagttcttatatttacatttagctgatcaatgcatctcccatgcaacacaagcttaattattattaggcctatcattgtaaaatgatttttctttccagaatcacatttggattaaggcagtgtctgggactcgtcacttggggtgcttatgcccaggaaaatccctaacactagcagactctcaataaatgcaattttttttagaagtaaggagaaacctggagacaacaataccacaaaatggcagatttaagatggattgtaaatcattaataaaaattttgcaacatattttattatataaaaatgttcaaattcttaacatggaaaagaattttcaaaatcaacatacaaaccacaaactggagcaaatgctgaatcaaatatcaataaagtgttaataatctcacagtacaaagaacccacaaagtcactgagaaaaatactaagccctcgagatattaggcagtagatcattgtccattccctaccaaatacaatagggaattcttacagcagttattaaaactggccaataaataggtcaaaataattcaaaagaattataaatgaaaaaaatataaattaaaaattaaccagaaacatacattttcaaattttggtgaatgtcataataaaggtcaacaaaggggaaagtgaggtaagttgtgtcacaactattatatataaaagaataatatgtaactactagaaaactattagcattataataaaatagtaactgtgttaaaactttaattcaaaaagttagtttcacagtcatttctactatgtaaaaatatacacaataaaaaacaaaaaactagcaagaaatttagacctaaagaagcttcagagatgcctcagaggtctcctcaattcccctagaaattaatctaatgcttttacaaacaaacagcacacacttttatttcagagattacatgaagggtgtgtgccagggacagtctggaactggcctcctcacattatcccaaaccttccttacccctcagctctcctcccctaaaccttcaccccaaccacacaccccttacatttcccttccctgcatctctaaggacccgagacaatcaaggtcacctctctctccagccgcccgcacccacctcccttgtcacctccccacagagtcctccaagaataagaagcagccccctcctgcctcccctcccacaacagcctcacagacacagacaaatccacactctacacacacacctgtgccctcagaactccttgctcaggatagagaggattctaaatgctcacagatggcgctctctctctctgtctctctgtctctctctctcacacacacacacacacacacacacacacacacactcagattcccagctcacagggactcaggccccgccccgcgccgcgctcacctcgccgctgcactgtgaagctctccacaaccccgtagttgtgtctgcagtagttgtccacccggccccgcttctgctccaggaggtccttctggctgttccagtactcggcatcaggccgccccagctccgtcaccgcccggaactcccccacgtcgctgtcgaagcgcacgttctcctcctggttatggaagtatctgtccaggtaccgcacccgctccgtcccattgaagaaatgacactcagacgtagagtactccaagaaacgtgctgtggggacacgaacgatccagtcacacaggcggcctcctgagaagacactgacagtgacgccgccatccggggctccctgggtggggtgcgggcactgggaaccttaaccggcccccgccgcaacgcccaccaccagcagcccaggggctcctcctctgtcttcctgaggcgaaagggggcctgggggaccaggcgggaaaaccacgtctgatccccaggcttttgggacccccctccctacctccagcctgttctggagacctccaagcaggagctggaggaggatccgcccagcaccgcagcccgcgccgcctcctcctgggagcctccaccccaaagacactctgctccttctctcatcccacatgtttaccggttccttaaacagcacccaccgcgttcatcctctgaacccttccttagtgctgaccttgtgcctggtctgcgctgcctctaggaatccaaacgagggaaaacagacctctccactccgctgggggagcttaaagagcagtgaaagtgatggcccaacaccaaacacacaagagcttagacaggaatgagaaatgtcggaagtgtggagttctagaacagagaataataggatgatctcaattacattagggtgccagagaaggaccctcttaatagtgacggttcagatgtgacttgacaggttaagcaggtgtgagccagggggcagagtggagcccgtgtctgtttggacaaaacgggaggcacatttcaggtttaggaaatcccatgtacaaaagcttgaattgatgaacttcttcaaaaaactaggagaaagttcactaaagcagagaggctgaggggaaggagggtaacagattagcccggagaaatcacaggagccaggtattgaaaagcctcttgggtggtgttaggattttggatttatactaaggacaattggaaagtacagaagagttttaaggagaataaaatcatgatccctgtgaatgtccacaaaccttcctttgcatttctaaatccacaaagctcagaaattcagttaaaaaaacttgtttccacaactcatctgataagggtaagtggtcgaaggtgtctcagagctcttattggtgacatgtgcttctgtactttcaatacatataaatatacatacatatatgtgtgaaaatatgcacatatgtaaaacactatatttttgatgtttttgtctttatgtttgaagtgtgaaaatgacaaaaataacttaaaaataatccttgggtaaaagcgaaatgaataaatagaagcattttacattgtgaataatatcaaatgtagaatcactacagaaatctgaggcatgttagtgagaaataatttcagcagcatcactatttgtgacttacaagggcaagttgttgaaagttaatagagatagtgatgaccgacaactcatgaaaatgttgaaaaatattgcataaggcaaaaaataaatatgaaaatattgagcttgcattgactaaatggattcaacaagaaagtggttgaatttatgcaactgtctaattgtttataatgaaacaagcaaaaataaaagactaaactgtgtggtgagtgtataacagatgtgagtctagaattttcagaaagagcacagtgtgaaccagtgctcttagcctcagcactattgacattttggaccagataattccttgttgatggcagaggctgttctgaacattgtgggttctctagcagtgtccctggcttctactcattgaatatcagaagaaacccctgtttgtgacaaccaaaaattgttccaaacattgtcaccgttccccaacgatgatgagagggaagggaggggtggtgaaccatccctgggtaagtaccacaggtgtgaatcatctgaaaaaatctgtgttgaacaagctactattagttatggagcagctgagaattgcattgaaaaatatttgttgaaaatcttggtcctatgtaaaaagaaggttttgtagaattctgctcccaatacagtgctatctttccagaaaatgaacttgatgagaaccaagatttaatgatttccttgccttaccaagcagtcactaatcatatcatttatcattcacatcatcttttttcttaatttctctgccactggtccactaattatctgtagtaatgagtcacaaccacagctattttattcccgttaaatgccccaactaactcatttctttcagtctcccactcccaacaatactagcaggcatcaaattaccagccttggccagaggcagaactcttggttttgtagtcaagtcccctcggaaaggaggaaaccaagaaaatgacattctcatacagacactttacaaaaatgagcagctccccagactgtgagcaagacctgcagaaatctccctttgccctttagaaatggtggcagagaggtgtgcaccctggatcaagcaatgtctatctttttatccctaaattatctaagcactttcttacagagaaagttaaaaataaacatgtgtgaagttgctgtcaccgtggcttgcatggttagcactgtaatccatgtccatgtgtcacacttagggttgacagatgtggcaaataaaaccagaggatgcccagttaaatttggattttcaataaattatggttttgtatctgaaattcagatttcactaggaacatgtattttatttggtaactctagcccaacttgctagtcaaaccttagaagaaggagtgatttaatacttccttgtgttcttcaacacatgaccattatagacatacagaacttttaaaatgataaatgcaaaatgaatgaaagtttccccaatacatcggaactagcagcccttgcatctctatccccactctaagaaacaacctggtacatatgaatatcagaaattctgtcaataattcagacacaatatagtcactactcactaatgatggacaaactctcaaactctagaatcagaaaacctgaataaaaacatgatctcttctacttgggtcaatttttaccaaccataagcctttttgtaatctatcaaatgcatttaataatagcgtaatcctcacgagattactgttaagtgtaaaattaaatgatgactcttcttagcactgatcacatactcaaatacattcccatttaaacttttatgatccctataactacagctcacattattttttgtattccttaattctaaagcaattactatcttcatcatgattttgcagttgtcttctgttcttctatgagtttcataaagaattgtcattctgaaaacatagggcagaaacactggtttatgtctaataatgcagtccagctaaacctcacacaaaaggcatctgctgacatagaagaaagggactttctatatgctcagatttaaactgcaatctgatttccagcactcaatttgtaatactgggttttacttataacctctcaattttagattccagagatgtatatgtttttaaacaccacagatacagcaggatcattattgaaattgcatactgaaattcacaggcctggtacacagtcactgcaaaatgttacatggcatatactgatggcgaccggattcattttatttatcactccattctcatgacctagagtaataactggtatattctatgtcactaataaatattagctgtgtgaaatactggctgtgttaaatattggctgtgtgaccttctgcatgagtagtcatcactgcacacaggggctttctagtatttcctcgctaataatgactgagcatctctggttcacaggtcctcctgcttctcttcagcctctttagccttttccttttgatccagctggctccctgaacccagagtgcagtccttccctgaagctctctactcaaaacagtcaatcttaacctcatcctcacttctactcgctcttcaaattgtccaatccagtttcctccctggatactccactgactgcaaatatcaactccaccaaacccagcacttgcttctctgtcacgttctcacttccccctccgcttagtggtactcaccacaattggcctctcccttctccttgaaaaaaatctattttccttgacgtacacgcatcatgttctcttgatttttctccaacatccctgggctctttctcagccccctttgctggcctgtgccctgttcttttttctccacacaatccatctccctatgtatcctcttccactccctggaatttaacacactacacgtattgatgccgccaacataaatacttgaagccctagcctcaccatgagtctcttaaatgccattgaccttctgattgctccacataaatgtcaataaatcatctcaaatttaaacaaaacttttatttccaaccacccacttcaaataatttcctcccatagtttttcctatctcaataaacaacactaccacccacttatttgtcaaaacaaaatccttaggaataagcttgattgttctaccccctttacagtaattcattaacaagctaaggaaaaatacatgccaagtctgtccactttatctttttcaccgtctttatcactaatgcactccatgaagccacaagcctgttttcgctggagaattccctgctgtgctcctaaatagtcttcctgaccacttgtgaaccccaacattccaatccccacagagtagctagaattagttttaaaaattgaatataggccgggcgcagtggctcaggcctgtaatccctgcactttgggaggccaaggtgggtggatcacgagatcaggagatcgagaccatcctggctaacatggtgaaatcctgtctctactaaaaaatacaaaaacttagccaggtgtggtggcatgtacctgtggtcccagctactctggaggctgagtcaggagaatcgcctgaacccagaaggcagaggttgcagtgagccgagattgtgccactacaatctagcctgggcaacagagcaagaccccatcaccaaaaaaataaaataaaataaaaataaattgaatataaattgactctccttgtaaccatacagtagcttctcgtatctatttaaataaaattcagtccggccgcggtggctcatgcctgtaatcccagcactttgggaggccaaggcagacagattatctgaggtcaggagttcgagaccagcatggtcaacatggtgatacccgatgtctactaaaaatacaaaaaaataaaaattagccaggtatggtggtgggtgcctgtaatctcagatacttgggaagctgaggcaggagaatcacttgaaccagggaggcgaaggttgcagtgagccgagattgcaccattgcactccagcctgggcaacaagaacgaaactccgtctcaaaaaaaaaaaaaataggccaggcgtggtggctcacacctgtagtctcagcactttgggaggctgaggcaggtggatcacgaggtcaggagatggagaccaccctggttaacatgacaaaatgccctcactactaaaaatactaaaaattagccaggcgtggtggcaggtgcctgtagtcccagctactagggaggctgaggcaggagaatggcatgaacccaggaggtggagcttgcagtgagctgagatcacgccactgcactccagcctgggcaacaaagcgagactccatcttaaaaaaataaataaataaataaataaaataaataaataaataaataaataaataaaataaaattcaaattttttaccgtggacatcagagcctataatgatgaggctcctgactttctctctgtgtcctacctcatcttctgcctctccatttccttactttctatacatcagcccctctagccgtctttctctctctccacataatttcccacaccagggctttccccccatttggtctctctggagctttcgtccattagatcttcatgactgtctacttattttgttgtctcagctgaatgtcactttctcaggtagagctccctaaacatatgaactaaagtaggtgaatccatgtctctcttcttcacaaacctgatgtcttttcttcagtgcactatgactctctaatattttattctttgttaaatgcttattgggttagtgtctgtctcctctattgttgtgtaacttccatgagagtcgggaccctctctgtcttaatcaaatagaatgatctgaacctagaatggagccgagtacacagtagctgctaagaaaaataagtgtggtttacatgaataaaccagggtatgggaagtgataactgtggggatcttggaaagcaagaaggggctcaaactccagcactctttcattctgatgtcacactagaccccttctcctcctggtgagaaatacaggcaaacttctttctcctccttctagttggaagaagaattcacagataaagaaacagtgatttaagaaaaaggacttttttttattgagagtcatctctttttgcctgggcacagtggctcacatctataatcctagcatgttgggaggccaaggcaggtggattgcttgagtccagcagtttaagaccagcctgggcaacatggcaaaatctcatttctaccaaaattacaaaaattagctgggcgtggttgcctgcctgtattcccagctactctggagcctgaggagggaggatcacttgagcgtgggaggcagaggttgcagtgagcctcgatcgcaccactgagctacagcctgggtgacagagccaggccctatctcaaaaagaaaaaaactatctctttcaatggatctcatagtgctaaggatctgtgcaagctttagagatttctggaaatgataacaacatagctggggaaaaataagagagaaactggaggaagaggtaagcagacatggctaattaaggaaagttgagggcatgatgggtgaacctatgaaatttaggacaagaccccagtaagacaatgagttcccaggacttgcccattgactttcagccctatgagatgtgaacaatgtccacattgtctcggtaaccccacacagagtatatagtttgaacattattaaatttttgatatttgattatttttgacttacaaaaatagaattttatataactcatactacgttagttaaatctcttctgtcatgtctagttggagcacttaggagatgtaggagaaacaagtatagaaaggttaaaagagattcataataaacactaacctgggccaggttttcagaggatgccttaagttctttaggcaccaaagaatacctcataaatgctctgtatctgtaaggtgactccaagtactaaagatctcagcttcagttccagggatttttccccacaagaaagaaagagcactaagtataacttctgtcagacaacctacatacactacaggggtacaggctttataaacattggagttcagaaagaaaagaaagtagataatggggaggccactgggtccatcctcacatatgaggaagaggggccaacaccaaaggtcctgtgggtgacataacccaggatcgtttaggagagaccctttaaattcccttgacttccacaaaattttcagaaaaaacctcctttgtctgacataagtcaacataataaaggcaagtgctgtatggggaatttattttagcatccttatttctaaatcctctaaagaccctgaggacatgtgatgcaaaggttttattggtggagatttgagtagaaatgacctgtatggaggccccttacacaagtctcatggagtgggcaagtagccaagctccttttgtggtggggaaattatttgggatccatatgataaagatgggcaatctctgaaaaatacgtcacaatttcttaaggtacatggcctgggcacaatgttaacaaaactccctattttccccaccccatagtagctcagcacccacaatgtgcacttacgtctggtgtccccagccaaagccagtggggagctcagcaccatcagtgtcactgtcagaactgccatgcaggagcctccagggagcctcagacacaccatgctggagaacaggacaggaccaggggccagagcagcaggcaagtctcactcagggagaactatgaacccctccacccacattccaagttatagggagtaagttactgatttccttgctcctggattgggtaatctagtgttggagaacgaatcagcatctgagttcaatagcatcatcagttgctggtcagagatgctgtatgaaggtcctcttctgaaacagaatttccttctttacaggattgtttttagtacttgaaaggtttgaaccagttgcatgtaaaacactttaattggggcggtatttttagccccaattattttagctctgtgctggtcagtgatgtgttcacaagtttgagccttgtaagagcattcatttcccacttgacaagagaactgtttgcaggagtgagtgtgttcaggagtaaaggagatggaggggacatggttgcaaaccaggagaccttaatctggtcctgttgcactatatcttactgttgtagatttgtgaaaattacatcatgtctcacagttgaaatgaaggcaccgtgatctttcaggtctttcaatactggaaaatgtgattctgtggatgcctcagggagcagcagccctgggtatctgatgatatgacagaatgacagctgttgactggagagtgtaatctttacctatttacaggtagagatgtctctaataagttaaaggaaattgaaagttagttaataatttaatcttagtaaaaagagttttttcaagtgtatctcctgatgcttcccccaagtttagtggcacctccagaacacacacaggcaaggggtttgcaggggccacctatatgcaatggagggtctgaatgtgcctttgtatagcacttaccctaacaatgcgataaggtcaactgtgcaatccaagtattcatgggtctgagagatcgatcaaggactcaaagtcagctgttgacagaacaattttgttttaaaataatattttatgtgaagagtgttcaatccctcattcctggttcccattaggatttcctcatttgattgagactatggccctttactattccacttctcttgttttatcgtaagggaatatataagaagactttgctggcaggacgtggtgggtcatgcctataatcccagcactttgggaggctgaggtgggcagatcacttgaggtcaggagttcaagaccagcctggccaagatggtgaaaccccgtctctactaaaaaaaaaaaatagaaaaatcagctggtcttggtggtgcatgcctgtaatcccagcttctcgggaggctgaggcacaagaattgcttgattctgggaggtagaggttgcagtgagttgggagcacgccactgcactccggtctggttgatgcggcgagactcagttttaaaaaaaaaagactttgctaactaatacgttacagaatgttcaggaaacagaaccctagggaaaatctgtgatttacatcagttgatgtaatcatataattttaaacatacaattctacatttagatagctattatgctttgtatttatataaatgtagcatctaagattcagaacggacttcaaagtataactatgcagataaagttctgcattaattcacaccctaccacagttctgataggcagtcattccttatgtgccttagtgtttctaggaatgggatactcaccatgctgcaataaaaatgactaaaatttcttagcaatttttgagcattttgctttgtactcagaattgtacagagctttccatacatcatatttttaatcaattctcacattagctgaatgagggatataaccttttcatccctacaagtgaagagaataaaatgatggagattaaacaacttttgcaaagatgcaaggctagtaaacagtaactcggcctcccaaagtgctgggattacaggcgtgagccaccacgtctggcctgcaaaatcttcttatatcttcccttacgataaaaccagagaagtggaatagtaaagggccatagcctcaaacaaatgaggaaatcataatgggaaccaggagtaagagactgaacactcttcacataaaatattaattattttaaagcagagttgttctgtcaattctattgaaccaagttattatatatgtaattccaaacccctcaagctctgtcgttatattatactacctcacattcaatttctaaagagaattatgtccattatactaaaattatttttatcactttaattcatggctgtgcaaatcagtaagactacttcttttaatgaatggcaacattttatagaccttggggtagatactttgtagcaattctagttatttcaaaagattcccctcatcaccatggttactctcctctggaaatgacacaatttgcgtttatgttacgtaaggacatccatagctcctgcttttatcctgtaatactaaggtgaaccttagcttcctttcctaggtcaccacatcacaattagttaattagttaattaggcaaaaataagtaattctacatcaagaatgtactaaaatacagttaaaaggaaactttcaaaacttgtttatataaatttgacacactatttataaatcatacaaatttatatttaaaaagatggccaatggcaatgaactaaattctgtatgttttatacatttatgagtaacaaagatgttgtcttagtttatttgtgctgtgataaaatacagtagactgggtaatttataaagaacacatggaggctgagaagtccaagattaaggcaccaacaggttcaatgtctggcaaagggcatggtcgccacttccaagatggcgtcttgcatcctccagaggggatgaacgctgtgtacttacattgtagaaggtggaaggatgagaggctaaaaactgtgtgaagcgtgttttacaagggccttaatcccattcatgagtgaggagccctacctgaattttaaaggagacacacttatactacaacagatgtgcttctttaaattatatatctcacactttccttcaatattcaatataaggatagttcaggctaaacaatgtagcaactctcaccaaaccatcagtcacataggtggtctaataggctgaactttttcacggaaaaaagagaataatcctctcaactcagctggctgtgagaggtgtcaaatatgagagcttatttcctgaggaaatgacaattaaattggtttctggaagaaagtggctttcagtacggaacttccatggtctctggtcttgatgcatgaaaccataggtttggttttacgggaaataaatcccaacattcccaggactaaacaggtaaaatcggaagcacagacttttgttgaacaacaggcaggttgacattggtaggattacagcatgtcttgagtcctactgattgtcacagaatggggctcacttgtagtaagcctgaaagcttgcaacacattttggaaaaataggctcttttggctatcagcaagccttagttatcatagaatgtctgccacttgtccaagtagtctcaaaatgttctcaggggttttcagaaagcaaccaccactaatctggaatttaaagtaaaaagcaggttactaatccttatatctaaagaaaaaatgataataacaataaatggataaacaggaccagtttcttcttagcatggaagatatgtatcctgaaacagaaaacggtgccatttaaaggccttactagtattcatcacacttgacaggaccctttccagtaaaatttcagcaatgtcctccattgaggaactttggtagtgccaatcattacaccatgacactatctaggtcagttgacaggacttcttcaacttccaaatgtcattctttgactcaacttagctgttttataacagaatgcttgccattgcatagttaatagagagaacaactagaattcccataggcctttgtactaatattgtaagtacaaagaattttctttttatttctgtttctagatcttatgttaattgtactgcggtaagtatccacctatctatccagtccaaaataggccagattatttttcaaaatttcattttggtgctccactagcccactccccagtgactgcagtgtggacagtgaagaaattgatgaacctgttgaactgtaccaacttctcaatctgtcctataaagtgtgtgcctggtttgttgcttattttatttaaaataaataataaaatcttttagcagttatttttctaacagttcatccttgtagacaatttattatcttgaaaaagtaaacttactagtacttatttatgttaacaatattttacctaaataaaatcaacttatatatgtgcaaaaaaattaacgattccttttgtcatgacatctcttcctaccctgtgtgcctgtcaaacaaagcaactctcagtatcatacagcagttttgagaaaaataaagcataagaaccacactaactattgctagcatccctgttttggtcttgtgttcattcaaggggtacactagcaagataaaggtggaaaacttggtactactacgtatcaatctagagatgctaaagatgatctgggtgcaaacaaaagcctgtcagtatccacagttcagaattttggatttgaccttaaggaggtgtctagtcaattgttagaataagaaaaaaggtatcagctagtaaaaaataatctaagccatagctatataattaaccagaagaaaatactttataataaccacagcagaagataatataaggattattcgaaatttttgagtttttccagaagtgaggaatctttattgctattacaagttctaaagctatgaaaaacaaaaaagcataacaagaatcagttctaaaagcaactggttcttccactgaggcaaaatacatagacatgggtttattttctctccagaacaggacttaaacacttaattctttttttttcttttctttttttcttttattttttttgagacagagtctcactctgttgccaggctggagtgcagtggcgtgatcttgtctaactgcaacctctgtctcctgggttcaagctattctcctgcctcagcctccgggagtagctgggactacaggtgcccgccaccactcccagctagtttttgtatttttagtggagatggggtttcaccatgtttgctaggatggtctcgatctcttgacctcggcctcccaaagtgctgggattacaggcgtgagccaccgtgcccagcctcctaaattattttaactgtccacatttccttcagtggtattgctgatactaattgcaatatcattaatattgaccatggttttttcacttgtagacttatagccatgacctagatagtgctatggtgcaaagactggctccacccaaagttcctcaatggaggacattgctgaaatcttactggaaagggtcctatcaactctgatgaatactaatatggcctttaaatggcacaggcttctgttgaggatacatatcctccatggtaagaagaaattgatcctgttcatctgtttattgttgtgatttttccttagtaactttacaccatcagaaaccaatttgtgttcccatatgggcaattaattggagtgtttatctagatagactctagacctaattccttccaaagggcccaccttctaatcctataatattggggcttagtatttaacatatgattaggagggaacacaaacatttagtctataacatctttttcggagacacatctgttcaagccctttgcccattttttaatcaggttatttgtttgtttggttggttgttttgctcttgagttgtatgagttccttatacatttttgaaattagccccttatcaaatatatggtttgcaaatattttcttccattctgcaggttatcttttcattctgtttattgttttctttgctatgcaaaagctttttaatttcgcttatgctgagtgaaataagccagttacaggaagacaaatattgcagaattcctcttatatgaggtaactaaaatactcaagctcatagaagcagagaatacaatagtagttaacaagagttgggggctgggggaaatggagcgctgtcactaaaagggtataaagtgttagttatgctggatgaataagttctagagatctgctatttaacatagtgcctatagttaacaaaataatgttgtgcacttcaaaatttgtttagactttttttgtggcctttttttttctcatctgtcctggagaaagttcaatgtgtgcttgagaagaatgtgtattatatctaaaacatgctaaaaaaattcaccaaaacgctattagaactaataaatgaatacagtaaagttgcagcatataaaatcaacacacaaaaatcagtagtatttctatacactaacaatgaactattcaaaaaacaaatcaagaaaacaatcccatttacaatatctatgaacaatataaaattcatatggaaccacacaaaaagcctgaatagctaagacaatcttgagcaaaaagagcaaaactggagacattacaccacttgacttcaaactatattacaaagctatagtacttaaaacagcatggctgggcacagtggctcatgcttgtaatcccagcactttgggaggctgaggcaggtggatcacaaggtcaggacttcaagaccagcctggccaagatggtgaaaccccatcactactaaaaatacaaaaattagctgggcatggtggcagccacctgtaattccagctacgcaggtggatgaggcagagaattgcttgaacccaggaggcggaggttgcagtgagccaagatcacaccactgcactccagcctgggaaacagagcatgactccatctaaaaacaataacaacaacaacaacaaaacccagcatggtactggcataacagtagacacatctactgatgaaacagtatagaaagcccagaaatgaatctacttatttatgaccaagttattttcaataaagttaccaagaacacacaatgggaaaaggacaatctcttcaattaacagtgctgagaaaactggatattcacatgcagaagaataaaattggatctttatctcacaccatatacaaaaatcaactaaaaatggattggagacttaaatataagacctgaaactgtaaaatactagaagaaaacagagagaacctatacaacattggtctggacaatgatttttattttatttgaccccagaatcttaggcaacaaaatttaaaattagacaagtgggattacatcacattaaaaagcttctgcacaacaaagaaaacaacagaatgaagagacaacctatcggctgggagaaaatattttcaagcaatacatctgatgaagggttaacattcaaaatacactagaaactctcaatagcaaaaaaaataaaataaaaaaataagatttaaaaataagcaaagaatatgaataaacatttctcaaaagaagacattgaagtggccaacagacatatgaaaaaatgcttaacactggtgggtgcagtggctcacgcctgtaatcccagcactttgggaggctgaggcgggtggatcatgaggtcaagagattgagactatcctggctaacacagtgaaaccctgtctctacaaaaaatgcaaaaattagctgggcatggtggcacacgcgtgtagtcctagctacttgggaagctgaggcaggagaattacttgggcccgggaagcggaggttgcagtgagccgagattgcaccattgtactccagcctgggcaacagagcaagactctgtctcaaaaaaaaaaaaaaaaaaaaaaaaaaaaaaaaaaaaaaaaagcttaacatcactaatcattagggaaatgcaaattaaagccataatgagatatcacctcacaccggaaagaatggttcttattgaaaaggtaaaagataagtgttggtgaggatgtggagaaaagggaacacttggccaggtgtggtggctcacgcctgtaatcctagcactttgggaggctgaggtgggcagattgcctgagctcaggagttcaagaccagcctgggcaacatggtgaaaccctgtctctactaaaaaatagaaaaaaagaaaaaaaaattagctgggcatggcagtgtgtgcctgtagtcccagttatttgggagtctgaggcaggagaatagcttgaacctgtgaggcagaagttgcagtgagccaagatcgcaccattgcactccagcctgggtgacagagtgagacgccatctgaaaaaaaaaaaaaaaaaggaaacacttgtacactgttggtgggaatgtaaattggtatagccattataaaaaactgtatggaagatcatgaaaaaattaaaagtagaactactatatgactcagcaatcccacttctaggtttacggactaaggacttaaaatcagtgtgttgaagagatatctgcactctcatgttcattgtaatgttacttataatagccaagatgttaagcgtccatcaactgacaaattttttaatgtggtatatatacagaatatattctgtgtaacagagtaacatatagccttttaaaaaaaaagctgctctgggtcgggtgtggtggctcatgcctgtgatcccagcactttgggaggccgaagcaggcggatcacgaggtcaggagattgagaccatcctggctaatacggtgaaaccctgtctctactaaaaatacaaaaaattagccaggcgtggtggcgggcgcctgtagttccagctactcaggagcctgaggcaggagaatggtgtgaacccaggaggcggaggttgcagtgagccaagatagcgccactgcactccagcccaggcaacagtgtgagactccatctcaaaaaaaaaaaaaacaaaaaataaacgctgttctgccatgtgtaacaacatgaatgaacctagaggacagtatgctaagtgaaataagctagacgtttctaagtgaaataagacaaatactgcatattcttatttatatatggaatcaaaaacaatcaaattcatagaagcagacagtagaatagtgattatcagaggctgcagattgggaggaataggaagacatcagtcaaagagtataaagtagcagacagacaggaggaataaatgaaaagtttttaaggtgatgtatatattaattagcttgagtcaactactccacattgtgtatatatatcataacattactttgtaccctacaattatatgcaattataatttgccaaaaaaatacaataatttaaaaaatcataggatggaacaaggttcttatatttatgggaggatcaggataaatcttcaaataccttctagaggtatagttgaggtgagatatgtactgaaagcaaaaatggaggctgggaactaaacaccaggcatttcctgtgcatgtgtctattcaacaatcatgccaatcgacatttctttcactgcctcccacccaaatgcagagagtgcatctgtattgtgaccaaacagagaagaggttgtaaaaagtagggctaccctgacatttattcaccaatatccatgaataaataaatatgtacacatgaatttatagatatatacatccatacttacataaacaattttaaaagtgtccatttttacttcaagagaactaaggatacttttgtagacattagggcagataaaagatggtaataaagaaaagggaaatgagaaggaaacatttctgtaagtgcaagtgttggggagaaggagtgggagctggggggaagctgagaattgtattttgtgacaaagagcatggttcatggacagtagcacatgtgagtcatggaaggacaataagatagggagaatcagccaagatggcgctccagccagggttaccagtgtctagacagaaagcaaagtaatagctcagcagccgcattgaatgggaacagtgaatagtgtgaaaatgagaaaatattggggcaaggccactgattcccacaggatgctctagtaaagctcttgactaggcctccaaattaaacatatggctgaggctagccccttctcactcaatggactccagtatttggtgaggaaatgaggaaaagagaggtcccgaagcaagtaattgtatgaaatatcaggatccagttttgacaagactgtttgtggatataccagaagagcaggagagagttccagaagacccaaacatccagcatccagaaggtcttttgaaactggtaattaaattatgaagtgaggactgatgggcatcattgagaacatgatttgggagccgtttaaccccttgctcactagtcagttcatcctcttgttttctacaaaaatgtagttatctgcttctgcataggagaagttgttgtgggagccacacagagcagtaacagtcagcggtaatctggtgaaaacaattttgtagaagggattgtccctccttcacatatttccatatataaatcctcacagtcagaaaaatattcttaatatctatctcgtatctttgccgcactttgaattcggtaaattttaactgaggatccaccatatgcacgtgtgcatacgcatgcaatctaggtggggatattcaatcacaaaaagtgtgttcagtgcttcctttgtgcaaaagattcttctaatgctggggatacaaagattcacatgaattagatcctacttttaagtagatcctacacagacaaaagagcgcatagtagtaacagacatataaaattcatataaaaatgtcacaagatctacaacagacatatctataaaaaacaatcaaacacaatttggtgttattaatttttaagacaaaaattttaaaacaaaaatggttaaaattaagtagaaacttatatttacaacaagaaggaagcatttgtatagatgtaagttccagaggaagtgaaactcagaacacagaggaagggttacgtttcaggttggctagagactcgctggggaacaggaactatcatgaataacgtgtgtgcaggaagcaggaggagtcaggaaacggaaatagagatagaggggagtctgttagactagaattgaaaggctcccttaaataatgctgggagatcagagtggatgtgcagagctgaagttctaagaaaggcattgaaaatttggcaaagatgttacatcttttagaaagatgtggatggacgcaggaaaaaatatcaagcagtaaaacttttacaatccaaggttagttatgagggattggacacagagatcagtgtggtgacaacagaaatggatgatgggaataccatgctccttttgcatttccagatgtgcattagaattggtatttgatgaataagggaggaacggaaggtcttttagaaggaatatattttctttccttttgtaggtaacacccaaagggatcaatcttcctatccatctgtgtgttggttctttctttctggttgagacattttgtagaaaaaagagagaaatttactggaaatccccatcccttcacaaacagttgttgctgtttttttctataaccaatagggataaagactgaagcaacatcacttatctccggcagatacatctgaccagaaggtcttatataaagtcttggagagaaggtgcaggagaacaggatgactaaattaggtgttgataagaaaggctgataacttcctttgtggaataaattaggacataagtagttagcaaataaagaatatttgcagagtaaagcaaaatgtgcagtgaggattggaggagctgggcatttagagtgatagagacataatgcctggttttccattcctgtccctgggtagtattaaaagcacaaataaaaagctatcctgctgctatctgcctgctattcttgttatacaagagatggagactgtcagagagatctattatgccaactctgattgccataggtttatgcacagacaaatgaagggaaaataaaatgatgagttattgtttattttacaccaggcactgaattttctacttccagacactttgtttcatttgattctcatcataaccctgcagtggatgtatgtatcacactatgttttcacttaactgctatatccccaacacattcaataatgtccatcacttatagtatttaataaatattgataatgactgggtgtggtggttcacacctgtaatcccaacactttggaaggctgaagcaggcagatcacaaggtcaggagttcgagaccagcctgaccaatatggtgaaaccccgtctctactaaaaatacaaaaattagctaggcgtggtggcgggcacctgtagtcccagctactcaggaggctgaggcagcagaatcccttgaacccgggaggtggaggttgcagcgagctgagattgcaccactgcactccagcctgggcaacagagcaagactctgtctcaaataaatacaaataaataaataaatatttatttattactgggatatgattaggaaaccaaatgtgttacatttttaacattgtatagtgacatagaacacacatatagtaagacatgtaaagcataaatgtacaacttaatcaatcattacagtgccaacatccatgaacccaccacccaaatcaagaaacagcatgaggccagcaccagaagctctcccctgcttcctcctgtctacattgctctcccttcccatcaagacaactcaccatcagacttccatagcaatcccttcattgcttttcaatacgccttcaaaatctaatatttattcctaaacatgcttagtaacattatacaaattaaactatacagtatgttctcttttgtgcctattttgtgatctatttcgtgattgtcaatttagtgacccggaaagaatcagcctgtcaataaatgctgctggatcagttgtatatccttactgaaaaaaaaagaaagaaagaaatttgacacctatctcactttatacacaaaattaattccagtagaaaacatatctatctataaaaatcaatacaataaaacttctagaagacgatattagagaatatcttcctgaccttgaagtagaaaaagatttttaaaatagaatccaaaactcagaatcataagaaaaaggttcatcagtggtcacaaatataatgtatctaaaacagggacagtaagaaattactgggcataactagcaggtgccatgggatgtgcctggaaagcttctcatgacgacctaccatgagcctatcacactcgtgccaggagcctctcaccaggggcttcagtgtttgtggttaggaaaacagaaataagaacaacagcggaatgcacccttaagtactttggaagtcacagaagggaaaagggcaggaaaatcggaaacatcggcacacatgttaatgaatgtttgttgtagttaaattgaagttgaaggagaagatggagtgaaggacactggaagcgggggctccaggaatagtcctgtgattcggctggtatttcttgtatatagttccagttcttgtcaaactttttggtcactaaactgttcctttctatatgttaaggcaagtttcacctcctttctgactttagaataagttggtagaggtcttcacagagtgacaaacacccattgtcttctttaggaaggcgattaactaaaacatgcacatacttccataagaagcacagagtataactgattataactgatgatattcaaagagcaaatgcttattgaacgtctcccatgtttcaaagagtgcggtaggagctaaggttccagggtgaagatctcatgaagatcaatatataccaggaaaaaaagacatatacagcatacactccatacaccaggaactttctgcactattctctcctcagttcctagaaaaataccgggttcaaaatagttattaatagttgttgaattaataaacaatatattaagtataaatataaacatttataaattgcaatgaaaatacaaatgggggttgggggtggtggctcacacctataatcctagcactttaggaggccaaggcaggcggattgcctgagctcaggagttcaagaccaccctgggcaacatggtgaaatcccatctctactaaaaatacaaaaaattagccaggcgtggtggcgcacgcctgaaatcccagctacttgggaggctgaggcataagaatcgcttgaacctaagaggcagaggttgttgtgaactgagatcgcgccattgcactccagcctgggcaacagagtgaggctatctttgaaaaataaaaataaaaaaaaagaaagagagagagagagagaaagaaaggaaagaaagaaagagaaagaaagaaagaaagaaaaaagaaagaaggaaagaaagaaagagtgggtataatttaaaagtaacaaaattcaagaatagcagataaaggatatattcatacagactggagtatttggagaaaacttgaaaatatagttcgtttgcagaagtaagacttgaagcagagaagaggaggaaatgattccgaggaacagcagtgggaaacgaaccatcatgaactgcatgagtgagagcagtactggcagcgggggtgggacagggagtgggttgatttagggaaaagcccagattgactggagtgaacatgtagattaaagaatagtataggataagagaagatgcacagagaggacctgtttttatgagaggccttagaagctgagcagtcacttcttaggaaggtgatgaactgaagtgtgcaaatgtaaaacagcaaaatcatctgttggtaaggcaagtgtcatataggtacaggaggagcatcaaggctggggaggtgacagtgagactagggtactggttttactgagtgccttgtgtccttccaaacttgtgcaaattattactatctaatgggtagaaagagaaaatgtggaatttttttagacctcttttcttctttcagagatagcatccaaagactgagttctcaaacccccaggttggttatctatcctggttcccagactctgtgctttaagatgaagcaggtcagttttctggacaaagggactttataaaaatctccattacttatcagttttcttcctatgcaaccactgagtgaagtaacatcatttgtctccagcaaataacactacttcaatagtcctagcattagtctggtttcgagaccctgtgaaaacgtggagtaggggcaaattattagttatgtggtgcgagaaagatataatacctgaaatttgtcgaaagaaacaggtgatagctgtgtggattgccaagaactctccccttttcaagtaagatccagcatgcttaatgaatgtagagcgtgaatcaggatacttgttctttttcagacataggtggaaagtccctgcccaggactaaatgaaaagaaaattgctttaatgctaggatctcatcactggtagaaaactaaaatctgtggtagggacaaaattgaaaggaaagaagaaacagattgattaagggtcatctccccacctgctggttataagaacatgcagggacaatgatggaaaagagaatcaatggttccagggtctggttagctatttttcaattatctcatttaatctttataacaactctgaaaataatcttttgtaccccttttggaggtgatggtagaaacatgggaattacaccctgacttgaaaaagataacatttattcctttgggggaacattaaaaagttaatactgctgcatttgtgcaaatcattcttcaaggttatgcattattaggataaataggatctgcagatcttgtttcctaggagttcaaagccaacataaacttgctataatacactgcaacaagcgctacaattgattggtttataaaatacaataagagcacaaatttgtgggttttcaaacatgagccaaattgttaaaatggtttacacactgaccgggcgcagtagctcacgactgtaatctcggcactttgggaggcagagacaggtagatcacctgaggtcaggagtttgtgacctgcctggccaacatggcgaaacccagtctctactaaaaatacaaaaattagctgggtgtggtggcacacacctgtagtcccagctacttgggaggctaaggcaggaggtttgcttgagcccgggaggcggaggttgcagtgggccgagatctcgccactgcactccagcctgggtgacagcgagacttcgtctcaaaaataataataataataaaatgttttacacacctacatgaaccttaaaaattaaagattggagctctctatgtgcatgagatagtaacactcattaaaaagggcaagtttggttaattaagacagtagaaggggtagagaaaatataatgaaacgatatgtaagggaaacgaaggatgaaagatgcaggccgggagaggagtactgtctgatgggagtgaagattcttccttcaggaatggaaggggatgcacagagtgaagccacccaacaaaaacaagacttgtatagctacagatggaagggaaatcaaccaggaaattattttggaaatcccagtgtagttacaagactaggaagtaatggttagaatgaagaggttggatttactgagcactaatattctcataatcatgctaggaaatatcacttgataaagagagaaagatgagtcgttttagaaggaatacatctctcttttcagaggcagtacccacagacagttctcaaacccagaatctgcctcatcagtctcagttcagcttacttctttttggggaaggcattccagcttcttgcactaggcatttcaagaaagaaaagcattcctggaaatccccaacctgtcacaggcatgtttcttcaaccaataggaatagagaatgaggcagcatcacttgtctccagcagatatgtctgctaagaaggtctgatctgatctcatgtcttggggaggaggcagggaaggagcaggatgactcataagtagtgagaagaatggctacgatgtagtttcacggaaagaaataagatactccatgtggagagacaagataccatattttgtagttgtgaagcagagtaaagactgagactcttagtatttagtgttggtgggggagaagaggttacctgatatttttcatgcctctgtgggaagtccctggtgagttttaaaagggaagggcatgactatgacgctggattctctctgctagtgatgcatgagcacctgtggtgaacgagatggaaatggtgaagaagcccatgaccccacctgctgattgtcataggacaatttgagggaaagtcacattattatgtactgattattttgttctagcaaagtagtacttctgggtgtattatctcaattaatcattatttttgttaactgctgaatgtttagttcccagcactcaatagatatttgtaaaattaacaaatatataagtaggttactaagaattagcaattttaagagatcactaagaattagtgattttaaagagtgattttaagaaattgtagtgatttaagagataattatgaggattaaaatcccgttctgcctaaactcaaagcccaggaattaaaattattagtttatttgagatcagcagggtatctaaagtaaaattccaatacccctctcataaaaagtcatattttactttatcagagctccttggggctcagttagtgaatatagttacatagtagaatgggaataaaaacacggtattcatggtcatgaggtcagaattctggcacccaacccgcatcttggtcaagtaattttctcttttgagtgtctgtttcttcatcactaaaattaaagggttgaattgcataatctctcaggttaatacttaactcattcctggaccatgataaatactaaaaaacatttcatttttatttcactgtcattagtcatttcagtaactgaaaatacagttcaccctgtaaaccaaaaataaaatttaagcccttcaaccaactaaatgggcccttctgcttggccaaggacattttaaagtaatcttgaaacactagttcaggtcacaatgggaaggggaggttggacttgcatcactataccttcctccctctagaatcgaggcacatctgaccctcattaacactagaacaaagaccttaagactgaccagactctttgtagcaataagataccaacgtgacagatagcatgccctgaaagaaatcaaagtattttatcacaaaatatatttatttgacatattttgaaatggccctgcaaagctgtctcttgtggggaaaatctacattctgtagaaaatcttctttcctttccaggtctttcccttgatccaggagagaattatctaagcatctggcactttcttttttttttcttttcttttttttttttttttttgcgacagagtctcactctgtcacccaggctggagtgcagtggctcaatctcggctcactgcaacctctgctgcctcctgtgttctaaacaattctcctgcctcagcctccctagtagctggaattacaggcgctcaacaccatgcccggctaattttgtatttttagtagagatggggtttcaccttgttggccaggctggtcttgaactcctgacctcaggtgatccactgcctcggcctcccaaagtgttgggattacaggcgtaagccaccacgcctggccaatctggcacctttttaagtttgataagaaacatttacaatctagtctgtctgaagcctgctacttggaggcttcatctgcatggtaaataacaaccttagtctccacaacctcttatcttaacctagacacttctttctattgaatccacatctttagataaattctcaaacaattgccaaccagaaaatctttgaatccacctgtgacctggaagcccctacttcaagttgtctcctttctggaccaaaccaatgtacatcttacatgtattgattgatgtcttatgtctccctaaaatgtataaaaccaagctgtagcccaaccaccttgggcacatgttctcaggatcttctagaactgtgccagaggccactggtcactcatatttggctcaaaataaatctcttcaaatattttacagagtttgactctttttgtcaacaacttaatgcgggggttaaggacaccaatgcccaacacagtcaaaaatcttcatataacttttgactccctaaagactaccaatagcctactgttgaccagaggttttaccaataacataaacagtctagtcatacatatttgtatgttatatttattatatactatattcttataataaaatgagctagcaaaaaggaaatattaagaaaataataaataaaataaaataaatttacagtactgtactgtgtttatcgatactgtaagtttacatgagctggtttacaagacaaaccatgtgtctaaaattgtgaagaaccgcagctgcagacctcactctatggtatatatcaaagaattcaactttttcctgtaatgccaggacttttctctgctccttgggagcacttcagcatcactagtggcactttgtatagatcccatgatgttattcaaggtttacaacataacgctaaacatgaaaaatatacgagaaccataagagatcactttttactgcaatacacaatttatgatgattagcatcaggaggcattttatgcacatacttgcagcactcggacttaccacagcagcaacagaaggtggctatgaagttatcacagtaatgtcctatgtattatagttattcaatgcagttgtgactcaatactgtatctttatgtttgtttacatgtctctccactgtgaatggcattatgtatggtctgtaagtgcataacttttcataagttttaattttttataacagatttgtgcatattttatggtagtaaattataaaaacatactagtatctacatatgttttatgagttcatgacatacctaactttaagaaagttttcaatatttctaggctacatgattcatctgtgggttttttttgcaaactgtcatatatctccaaaaaatttcaaatatatttatttttaaaaatcaacccataagaggacccatgcaattcaaacctgtgttgttcaaaagtgagctgtaattacaaaaaggagaaaataattatctgaaactgatttcaacaaaaataaagataaaatattttaattatcctaaagaaaaataattccccaatatgactaaacaatgttaactaataaaaacagtcctttgtggattctttttcaagtactccttagaggcaagacaagaacattatttgttgaaaccattttgggagtaattatgcttagtgaaattcaattagccagtacattgatagtaccatttgcacttaacatagaattatggaatgggatctttactctttgactaagaaatataagtctcacaaattaggcaagaaacattgtagcttagtttttcatcattatatactcatgaactttccaactcacttcctgaaaaactggccacatagctacaattatttgtcacccccttggtaactccatgtggatactctgctgaaagcctggcatggtccccgtgcttccagtgcacaacttcctaatattctgtgcttgccaattcctaagtaagggtgaaaaagttgaaactccttgtcttttgtatgaagcagtagttggaaaagtgtgtcacacctcatgtaggaagctatagacctaagtagggtttattgagatgtcctatagatctccctagaatatagaaattcctgtcaagggagaagaggaataaccaagtgatctgccattttcattgttggaaaaaaatatcagtattcatgtaaaagaggtctactttatgagttaagtcttggtccaaaaggaaacctccatatacatgcaatgtaagtagggattggtcaatactttctcgggtgaattctcaagtacaagagaatattttaactgcaacactgcctcattggtgtcaatacccagctatctttcagcggggctactggttgttggagcaggtacagacttccaaaatccaagtgaagaaaaagtacagtgagtcatattcttttttatttaaaaaaataaaaattaacacactacttttcttataatactagtaacacctgcccaataaggaaagattagaagtctacaaaattaatagagacaaattaatctgtcatttcttcattgtgagataatcactatgggatccactctccaatgcaactgatttttaaaaaattaaagcctctgaaaagcttcttaaggacaaacagcaataatgagacatctgttcaagaaaatctctgaaaattggcaagaaaagcaagagtctgtggtatttgaaccaagactataccctccctctctcctgcatgccagctcagtgaggtcagtaaggcatagactccactctagattgctacagcccagagcacaggcctccctctccccacagctccatatcagagcgctttatttctaggaagggcaggaattcagaatccctcatcctgtccccagctacctgttgctgagactatgtccgagacaagtgcagttgagaagtgagaggaccgttcttctgcccaattcccacttgtggaatggagagtctgccttgggtgtggtatgctaagactactggggccctaataaccctttacctggctcatgagggaatggctccactgcaggagaggcaaaccaataggacagcaggctgctggccacaccctccacttagtgctcagctcctagaattgaggagtcactccgagagaagcttgccacagttacacccagctccagagccctgacttagagagtttgcctgggaggaaaggcaatatattaggaatatattttaggaacatagaatatattttatatctattctatataaaatggaatagatatcctaatgtattcccaaaggaagtaacttcatgtggaacagagcatggagaagtttaaacctaagggcactctcaattacagtagagttgtggtgaaaagcagttgggagatttgtgcatctaatgcaggtacagcttagactgtaggctggttagtttacagaagagaactagagaataaaataggtgggaagagccctcccaaagtaaaacaaatatcaaacactgacctcagaaactatttcatagaaggactcactattttattcgattactttgtagaggaattttgccccagggcattattgaaaagagtggtaattaatggacttcagtggctgggtaggtgagggaaagaatgaaaaagagtcctacaggaccactgtcattccagggtaaccctggatatactcaaagctgggcctccttgaggtaacatcaaaagcttaacactgtgggatgaggagatgaagacagactttattaaaataatccagacaatcattgttaatcacataaacaaacaagcaaataagaataacaagcaaaatgtgggggtagtacccagagtttctataatatagttcctaaaatgttcatttttcaacaaaaattatgagctacgcaaagaaacaaaaaagtgtgaccaatacaccagaaaaatagaaggcagaagaaattgcttgagagaacaaatttaacacaaaaatatttaaagtagctactatacatatgtttaaatatattcagtattttcatcaggattctccagagaaacagagacaaaaagatatgtatgatgattgactcgctcaattatggatgccaagaagtgccacaatatgccatctgcaagtaggagacccaggaaagcaggtggtgtaattcagtgagagtcagaagggttgaggatcaagggagccaatggtacaactcccagtctgaggccaaaggcctgagaaccaggacatgggctgcagtcatggcaggaggaggggaagaaggagctctggtgtccaggggtagaagtagatgtcccagctcaaagagaaagagaattcacccttcctccacctttttgttccatttgggtcctcaatggactgaatgatgcccacccatattagtgagggatatcttctttattcagtcttctgattcaaatactaaaatattctggaaacaccctcacagtcacactcagaaacaatgttttaccagctatctgggcatctctcagccaacccaagttgacacataacattatccattacattcatagacctaaaggaaaggatggctaaagaagtgaaggaaggtgtgatggcaatgtttcatcagagagaataacaataagaggaggtgcagctgggcttcctgggtcgagtaggggctcagaaagctgtgaaactcactcatttcctgcatcaggacttacttcagtcctggatgaataacactgaagctatatacttacaatattcctaacacccggatttgtatatgtgttttcttccccaagaaagctataaacagcgaaaattttgctgtaagtttccctgtgtctttctctccctctctccctttcccctccccaaaactaaagatgaaaggaatgttaactgtccgtttttctgtgaccagcaaaccttatctaacttcccaattccagttccttgtgaacatactttataaagtcctggtaagatcctgtctcttttgctatgcctctacaaggtcataaagtaaataaaacctaggttgcaattccggttttcctcaagatctaagacatggaacaaaataatttactgcctttgtttctcactctggtaacatcttcccaccgcatgtatttccccccttaaagagtttaaaaggcaattacccaaaaccagcagtggctacccgttcgagaccccttccacactgtggaagctttgtactttcactctgctcaataaagcctacagctttttctctctattggtccgtgtctctatcactcgcggcaggcagccgccacaccaattctttggcgtggctaaggcaagaacctttggcattacaacaacagcgatagtagttgtcttagtccattcagctgctataacaaaatgccttagactaggtaatttataaacaacagaaatgtattcctctcagttctggaggctaggaaatccaagatcgaagaacaaacagattcagtgtttggcaagggcttactgtctgtttcccagacagtgccttccacctgtgttttcctttttttttttttttattattatactttaagttttagggtacgtatgcacaatgtgcaggttagttacatatgtatacatatgccgtgttggtgtgctgcacccagtaactcgtcatttaacattaggtatatctccaaatgctatccctcccccctcaccccaccccacaacagtcccctgtgtgtgatgttccccttcctgtgtccatgtgttctcattgttcaattcccacctatgagtgacaacatgcggtgtttggttttttgtgcttgcgatagtttgctgagaatgatggtttccagcttcatccatgtccctacaaagggcatgaactcatcatttttctgttttcatacagtggaagtggtgaataagctccctcaccttcttttacaagagtactaattccattaatgaggactctaccctcataacctaatcacctcccaaagaccccacctcttaataccacacactagaaaatgggaattgagcttcaaaatataaatctgggggcaggggacacaaatatttagacaatagtataataaaaaggaaccaaatagaaattatggagttgaaaagtacaataattgaaataaaaattcactagagaggcttaaccataggtttgacctagcagaagaaagaaatgtagaataaagtttaaactatatttcaaaaaaagattttggtaggtctatgccatgcttcttcctcatcatctctgccttttaaaatccaaagacattttcaaagtatatttaattgtaacatttcccttgaaagtacgcattattctccaaatgtacattattttttttctaagaaaccacctactacttagcattataaataggtgcttcttttgtgttccattagaccataagccccttaagtttaagcctgttttccacaagtctgcatctcccaccatgcctagaaaatggccttgattcaaaaaatatttcttgtgtctttaaacaaattgagttgaattcaacacagaggggcgtttctctacaactctacactgaccctacattctctagtgttttcatattacacttacctccaacacatttatttgttcctggtctcgctcttcttcagtcctaagttacaactaacaaatgaattatataaaaacaataactggccaggcgtggtggctcacaactgtaatcccagtactttggaaggccgaggtgggtggatcataatgtcaggagattgagaccatcctggctaacacagtgaaaccctgtctttactaaacatacaaaaaattagccaggcgtggtggcgggcgcctgcagtcccagctactcgggaggctgaggcaggataatggcatgaacctgggaggtggagcttgcagtgagccgagatcgcgccactgcactccagcctgggtgacagagcaagactccatctcaaaaaacaaacaaacgaacaaacaaaaataaccactgcttcctatattacctcattctcatgtgtgctttttcaggtacaaatttctagagattaattcaaacacaaggaattgcatctggaaatttagaagctggaattctctaatgatagagactgcctcttaattcttgtctggccaagactagcattgtcttcagtcaagatgcaaatgtatacttcctcgcccgtttgtcgataagctcaatcacatgtagataagtcaacttatcacgtaatataaatggttgcaaaagaagggtaccagggctttggaattaggcagaacttagtttaaattttactctgctatatcctggatgtctgactttgggcaattttaatggtctctctgaatctcaacattttaacctacacaatatgttaagcaagtcttatatgaataaataattgaacaacattaaaattaaagttaggtatactatctataaatctaacaagttatagagatctgttacatcagggttttacactgaactaaatgaaattgatcaaaattctttttgatcaaaaacagatgattgttggtaattttaggtagtttaatgtaatttaacacttcattaaaagacattagagactgggcatggtggcttatgcctgtaatcccagcacttcgggaggccaaggcggtggatcacttgaggccaggagttcaagaccagcctggccaacatagtgagaccttgtctctactaaaattacaaaaattagctgggcatgatggtgtgagcctgtaatcccagctactcaggtgagtgagacacaagacttgctggaacctgggagttggaggttgcagtgagtccagatcgtgccactgtactccagcctccaggcagtgtgagattctgtcaaaaaaaaaaaaaaaagacattagagatacctatgtaaatggaaagatatgctatattcacaaataaaatatccaaaatataaacacaatttttctctgagttaatctacagaaccaatgcagttctacttaaaatcccaacataatattgtggaatcactatgctgattgtaaataattatagaagagcaattgtttaagactagcctataagttagttacacatgcaaataaacagtttggtttctttactagttatacatagaaagaaacaggttggtaagattttgcccagctagtcctcaatttattatcagacttaagtataaataggagagttgtactgatgcatggatagacctatagacaaacgaacagaaacagcaggcccagaaccaactcactcatatgtaaaatcatatttatgttggagttggcattggaattcgcttatgaaatagtgcagtaagtcatcctgagagaatttgttatccagacggaaaactcagtgttggattcatacaacatagtatccacaaaaatcaattcaattcaggctaatcaaatgtgaacaggaaccacagtgaactatcaccttatcccagttggaatgcctactatcaaaaaggcaaaaaaaaaaaaattgctggtaaggaggagggtaaaagggaacttttatacaccattagtagaaatgtaaattagtacagccattatggaaaactgtatggaggtttctcaaaaaactaaaaatagagctgtcatatcatccagcaatcccattactgactatttagccaaaggaaaggtaatttttaaatttttaaaatagaaaatttagaagattattttatgaactgaagtagggaagtatttcttaacagggatgaaatagcaaaaaaaatttttaatttttaataaatatactttaatacatatttttaaaaacttaatcaaaatacactttaaaaatatgacacaaactggaaaaagttatttttaatacatataatataggaaaattaagctgtaaaaactaaaatttaagtcttataagcttatatctatctatacatatgacatttttatatttataaaaataataagaaattcagtgccactccagggatgagagctagcttatgaaaaggaagcatagcaggtcaatacataatgtgaaaagatttccacgcttattagtaatcagataaacacatttcaaatcactacgaagtatcatttaattctcaagagatgggcaaaatgaagtctgacaataatttattggcaagaaaattcattagtgtgaacaattaaacacttctagtgggggttgaaatttatacagctagttatagtaaagttgtaaacacaaatatagtgcatagaacttctagtcttaggcatttgttctaaagaaacattaggtatttggacaaggaagcatgcacagggatgttaacagaggtgtaggtcataatagcaaacagaaagaaaagaaataaccagaattctatcatggaaaaggttctcagaagcaaaattcctgcacccttggttatggatccacagaggcttaatgtgaagggggcattcagatcaaatgctcaaagtggagtaagatatcattgtctttcacagaatcacttcatagactgcagcagatctcccttgaccaaccccccgaaaccagtcaaattcttcattttccccaaagtgaggactcccacattaagaagccctcagtactgagataactagcgataaatttatccattgcaagggtggtcttgatgcagggccagcaagcctcaaaactggggcttcacccgagagtgttcttggcttcactcgggaaagattccaaggatgagacagtggtgttagacagcaacttttatggaactaagctactccttgaagagcagggttaccctataggcagtgtgcccagaatagtagctcagaggcagttctgcagtcatatttatacccacttttaattatatgcaaattaagaggtggactatgcagaagtttctagaaatagggtagaaatttctgcataatccaccccttaatttatagatggtaactccaattaccacttcaatgaccccagtgggtcattattgccatggaaagaagtggtaacctctgggtgttgccatggcaatggtaaactgacatggcacactggtaggcatgtcttatggagaggtgcttctgccccatccctgttttagttaattctcaatttgatctgatgtctgagcctcacctactacttcagtcttatgacccccagactccccagctgataagaagatgcatgagtaaaggaggcaattgagagatgcttcctttcagtgtccaagtgtcaaaaagaattcttagtcttaattaaaatttagatataagaaatctactgaaagaaagtgattacagaatttacaagttgatttggtgatgcctcagcaagagtgagaaatatacaataaactacaagacagaaaatccataagagctaaaaatgagcattttgtggtaccaatcttgctgtaaaaatcttaatattttgtgtatctttctcagcactagactagaacctatatgccaatgggtagtgatacacatctgtcactggtaaagttgcataccaattcacaatcctattctcatacccaagttattactacacattgctcttgagtcagtagctgcatttgccaccctggctcaaaatatcagccatcacatttagtaaattctatcatacaaagcaaattagcactgatttatcagatttaccaatgggtggggtgaggaggaggagggcgctggctgacttagcccaggccctgaagagccctgttccagagaatatgcttgtgctcttccttatggcccagcatatgcacagggctccagtcatttgcctccagcaggaggctcttccacactcattcacagtcagctggattccaatctctgctcaagtgtgagcaatgcagatccaggcccctggttaatgtagtcatcactgttcaagcccagtctctttcagatgttgagacagtggccctaactctgtgtggctggcccagagctgtgcacctaccctcactttcataccacattaatttcagatccttattgtcacgggtttcccaactacttttttttcttcaggggaaacctccacaatgtagtttctaatatgttgaattcatactccagaaagtgtcctgtagaataatgtcttactgaaaacggccatcacagccaggagtccttaactatgttcttcgatacccttagttacagtttgttgtcatgttcttcacatcttgtgtgaagattgttcaagtgttggccaaaggatatgtcactatctaaaattcacattgagaacctcagagtaactaataataagtgtgatgcttgtaggaaaagaagagctatttggtcacaggatgtggttattagaatagggttgtggttgaaggggaaggatgatgacataaatctttgcataaaccacattaacatgaaaccttgatattatcattacatacttttctttttatctaataaggcaaagtagagaagtcagcatcatttgtctctggcagactaaactgtcaagaaggcatacccaaggttggtggcagggggagcttcattagcattaggaataatagaaaatatcaaagaataagttttgtaagaaatacatagactcaacagaaagtaaaaaatgtactttactgaaaagaaaacaaactataaatgaatcatgaagttggatggagatataatctatagatttaaaactatttttattcaaaataatgagattttaaaaaataataaatgttctgaaagtctaggataagtatactgtcctgtattgttgattttttaaagagtagtagagtgtattatatagcatattatataaaggcatgggcctgagttaggcagtctttttgtttgttgaggtaaaattcatataacaaaattaacccattttaaggtgcacaactcagtagcatttagtgcattcacccatgttgtacaaccatcacttctatgtagttccataacattttcatcacctccaaaggagaccttgtatccattaagcagtcactccccattcccacttcctcctcagcaaccacaatctggttttagacaggtcttgttttgcatctagggtggtgatttctacatcaatctatgcagaaggagcttaggcccagaattctgcatggtgggtagggactgtggcttgtcttgaagctagatgtgcttgcatagcaaatgctttatctttatttatgtgtgtttgggttatttaaaaaagaatgtcttataaatattatggctatattgttaattttcaaagtgtttttgttgttttacctatggagaaaagattaataccaatttgatttgttttacaaagggactacattcttcaatgtttgtgaaaataataattaaaattttgtttggctgtgttttgtgtatatatttaaagctgtcttgaatttctaatctatctgttttaagtttttctttttgtttatccttattgcgctcttaaaatgttttctgtttcttcatattattttacatgtaagagcgactaaaaaatggtcatgagtttgaagaaatcagatggaatttggggctaatgtttcagggtctgattccttcactgggggaccatgaaggccatagcgtggaattattttctctgggcccattcaatttcttctgagaggaaacttcatgtattttgtttgagggatagatgccagccacctatgtggcagaggtcagagtggaagagaggtggggttagctgttctgcatataatctttcaattaatctccttaagtgtccccaagtttttttttaaaaatgtttaaataaatactctttcaagtatatggtgaagtttttacagccactaaaaataagattttatgaaactgtttagtgatgtagaaaattgtctaatctgtgggaaattatccacagattaagtaaaaaacaaaaaactacaaagactaatactacaattctgtaaatgcatctatactgtgatatttatatttataaaaacaggaaggatcttaatgacactcagaagactatgattagatgatagaagaaccactacatttttctcctcccaacagtcttaatagggcctgcaggtctaaggtgagtggccttgaaaaatctctgttcagggaaatttgtatggaacattttaatgtggacattgtgtagaactttgcctatactgtccctgtagtgtcttttttcctcttctgcaggtcttcatggtcccctgggatcatagccacaaggtttctgttcccagttgagctctcaggtctacttttcaatccttttacataactttacccatctctacctctcccttccctccaaagggttcctttttatccactgtcctcatggaagtaaaacaatgacctcaccatacctcacaaataaacagaagaagaaagatgtgaatcctccctaaatctgatgtcttaaacttgaaacccatgaaccctgtggtactcaggtgagcagagatagaagagcactacgcaggttcacactcttttccctgaagaaggaaaaattcagaaaaaaactccagtctgtagttttagagcaacgtttttgtgggaccctcccagactggaaatttgtggtcctcctcttctggggttgggagcaagccctgaatcttcagtgccatgtagcctggtctaagctcaggaacatttctttacgttttgatgaagctgcaaagttttattagccataacatgtttgaatctgtaagatttctaagtaagtctgacaataaaatttcagattcttcagctgaccggaagacttcaaagtgccttcactttttaaatcacctgtagatgaattatactggacctgaccaaaagtgtttatctgtgcataaatcaaatacagtcaactttccctatccaaggttccacatctgtggattcaacctaccatggatttaaatctgtggatatgggttattacagcattttatagaagaggctgagcatccacagattttgatatcagctgggttcctggaaccaatctcctgggggtacagagccacagtcaagtatgagaaacaaagagaagaggaagggcccatttctgcccataagtcatctacagaggagggcttaatcagctgcattaatgcagatttccacctcagggctggccctggagaaacacctctagatgaagacaattggatgtgtaagtggccagatccacatgcaattacttctttagaataataaagttgtggcttgacaaatggtcccttgtctgtgataggagtcgtggcataaatccccttctgggctacagtgtagcacaattgccctctctctagtgtgtcactctgaagttagactgcctgggtttgaattctggctccatttcttactagtggtgtagctttagtcaagtatccaactcatttcgactttcttttgatttcctttgcatggtgtatatttccattctttttacttttaatgaaggtatgtctttatatttaaaatgggttgctgatagtttacagttcaatattccatttttattcaatctgttcttctccatttcctaattggtaaaatgggggagggagatataataatacacctacttaatagtatcattctaaaaattaagtcagttaatacaagtatggtaaaagcaattagaagaacatctggcatgtggtaagtactcaatacatatcaggcactatcatcttactatcaattattattatcatcatcatgactgggaggtaacatggcaattagtcttcattttctcaccagcctggctgatgaacatccagtatatctgaagagaaagtttcagaatcaaaaacaaaaagaggcctggctttctttatattgggtggaaataaggaggagggaaggaatatgagaggaacaggtaatttgtccttttagttttattttaactacctccaggaaattaacctattctcacatatctggggaaacaaccgggtccattccttcactttaattctgattttttcccaaaatttacacatcccaggatttctggcagactttaaactgcaaacatcaggttcataccagtaagccaaactcgtagttgatttggaggttcattgtcaatttagtgaacagtgcctagatcataagattcaactggcacatcctgaaactcactggagactgcacagactaaagaaatgaagcatcctctactttttcacaagtgcaaacacattaagatgctgctactttttccctgtagacctgtgggcatgagccgtccttgggttaagtcacttgatagtgactcaaagcacaaagcacagggtaatgcttgttcttttctttctttctttctttttttttgcaacagagtttcactcttgttgcccagtctggagtgcagtggcatgatctcggctcactgcaacctccacctcccaggttcaagcgatactcctgcctcagcctcccaagtagctgggattacaggcatgtgccaccacacccagctcattttgtatttttagtagagatggggtttcaccatgttggtcaggctggtcttgaactcctgacctcaggtgatccacccaccttggcctcccaaagtgctgggattacaggcatcagccaccatgcccagcctacctgttctttaacttgattgttgaacccttcacttctctggttagttaattttccagacagagagcgctgaaaggacacccatgtatcatgtgttatttacaattcctcaccccaacccccaatctccacaacctcactcccttctagtcaggttttggtgacaatttgcccttgcagaagctgggtttaagtgaaaccaaaataagacattaaatattttcctcttcagcaaatcagaaccctgtgggaagcagcattatctgtctctggcagactaagccatgaagaccataagaaaaaatatttagtgatggaggaaggaaaaaagtatccattaacaagagcaaaataatataaaaagtatttaacaaggaatataaagaatcatcagagaaagtgttataaaacttttttgagacaagagaagatgaataagtggagaagaacatggtgttcacagagagaaatatagtagatagaattaatacagtttcaaattatgtattttcctgttgttgggtggagtgttctgtaaatgtaacttacagcttagtcaagttacttgttagcactgttcagttattctatatccttattgactttctgcttaatttttctatgaatactaagaaatgagtataaaatctccaatgataattttggatttttctatttctccttccttttatgtcaactttgtctcctgtattttgaagctctgttgttaggtgcatatgcatttaagattgttatgtctctttagagaaataaccctttatcattaagtgatgtctgtctttatccctattagcatttcgggctccaatttctactttgtctagtattgacataatcattctgactttcttttgatttcttttgcatagtatatatttcccttctttttacttttaatgaaggtatgtcgttatatttaaaatgggttgctgatatgttatagttcaatattccatttttattcaatctgttcttctctatcatttaattggtctgtctggaccaattatatttaacatccttattaatatgttgaattatttttgctagatatttctattaattcgatgaaatatttatttctaaaatcatttttttgctttcttttggattagttgttgccctagaattttacatatatgtataatctatcttcaaatctaccttagattagcatactccagatttctcttattcactgtgcaattgttgtcatataatttctttctcatattctgtaaacacacaatacattgctactatttttattttagacagtctgttacctcataaagcaatgattcttaaatgggagcaactttcccctcaagtggcatttgacaatgtctggagatagtttttgttgtcactaatggggaggctgctaccggcatgtattggatagaggccaggggtgctgttaaaagtcctgtaacacacatgacagcctcccacaaaaaaataattatcatctggctcaaaatattaatagttctcaggttgagaaacctcattttagagatttttaaactttcattttaagttcaagggtacatgttcaggtctgttacaaaggtaaacatgtgtcataggggtttgttttatagattatttcatcacccaggtattaagcttagtaaccaatagtaatttttcctgatcctctccctcctcccaccctccactcttcaataggtcccagtgtgtgtggttcccctctatgtgtccatgtatgtattatcataattttgctcccactcataagtgagaacatgcagtatttggttttctgttcctgcattagtctgctaaggataatggtctctagctccatccacgtccctgcaaagaacatgatctcattacttttttttttttttttttgagacagagtctggctctgtcgcccaggctggagagcagtggcacaatctctgctccctgcaagctccgcctccagggttcacgccattctcctgcctcagcctcccaagtagccaccacacccagctaattttttgtatttttagtagagacggggtttcactgtgttagccaggatggtcttaatctcctgacctcatgatctgcccaccttggccttccgaagtgctgggattacaggcgtgagccactgcgcccggtccaatctcattcttttttatggctgcatagtattccatggtgtatattaccaaattgtttttatccagtctatcattgatgggtatttaggttgattccatgtctttgctattgtgaatagtgctgcaatgagcatacgtgtacacgtgtctttataatagaacgatttacattcctttgggtatataaccagtaattggattgctgggtcaaatggtatgtctgcctttgggttttgaggtattgccacactgtcttccataatagttgaactaatttacactcctgccaacagtgtataaacgttcctttttctccacaacctcccagcatctgttagtttttgactttttaataatagccattctgactggtgtgagatggtatctcattgtggtcttgatttgcatttctctaatgatcagtgatgttgagctgtttttcatatgattgttggctacatgtatgtcttcttttgagaagtgtccattcatgccctttgcccacttttttatggagttgttcatttttttcttgtacatttaagtttcttatagatgctggatattagacctttgttggatgcatagtttacaaaacttttctcccattctgtatgttgtctgttcactctgctgatagtttcttttgctgtgctctttagtttaattagatcccatttgtcaatttttgcccttgttgcaattacttttagcatcttcctcatgaaatctttgcccatgtctatgtcctgagtagtattgcctaggttgtcttccagggtttttatagttttgggttttacatttaagtctttaatccatcttaagttaatttttgtatatggtgtaaggaagggttgcagtttcaaccttctgcatatggctagccagttctcccagcaccatttattgaataggaaatcctttccccattgcttgtttttgtcaggcttgttgaagatcagatagttgtaggtatgaggtcttatttctggttgtctattctgctccactggtctatgtgtctgttcttgtaccagtaccacgttgttctggttactgtagccctgtagtatactttgaagtcgggtagtgtgatgcctccagctttgttctttttggttaggattgccttggctattcaggctctctctagttctgtgaagaatctcaatggtagtttttaataggaatagcattgaatatataaattgctttgggcagcacttgcttttaaagtttttattaaaaattatttgtcattagtttaataattaaggctaaggaaaggtatctgtatagccaggtggggtggtgtgcccctgtagtcccagctacttggaagactgaggtggggcctgggagtttgaggccagcctgagcaacacggtgagaccacatctctaaaaataaataagtaaataaaaagacctatacaaagaatgtttacaatatgcacattaggactggagagttcctgggaagagaatcaatcactactggacatgaggaatatcagtctccagacagtcagctttgtaaactgattcagatgattaagaatttcagtctaagtcaacaagtagttattgattacataccatagtatctgcaaagtcttcatgaaataacctatttggtttagctgtagaatactcaggagctatggagaaggtagatctggacatggaggtaattttgcatgtttttcagtagaagaccattacaaagcaatctttcctcattttattattattattttaagacgaagtctcgctctgttgcccaggctggagtgcagtggcgcgatttcggctcactgcaagctctgtctcctgggttcatgccattctcctgcctcagcctcctgagtagctgggactacaggtgtctgccaccatgcctggctaattttgtttttatatttttggtagagatggggtttcaccgtgttagccaggatggtctcgatctcctgacctcgtgatctgcccaccttggcctcccaaagtgctgggattacaggtgtgagccactgcgcccggcctcctattattttttattgtgcagtttattcaagtgagttatttaaaacaactagttcatacacataggagttgttgctgacaaagaattggtggaaatgatattaaataacaaacaattgtttttataagtttcctctgcttcattaattttatgattgtgagagaccacgtgactggatatcagcatacaggactttgtatcagaatatgagcttggcagtcataagagattacttacaattcttcacaattctgtattttcatttgtaaaactccataaagttttttataagaataaattgtagcaccttattcatactggaattcaacagttcttagttcaagtctcccttgagaaagcttcactgtgtttttagtgcagattagtaaagacaagatcttgactggtaggtgagtgtgtggaatttatttcaaatatgggggctctccaacactcgcacaccaaattcatttacatattgccaaaagccagaggatatttatgataagttgcaaaaatagctacaaattctttgtagcccattctgtcaagaaatgcaatctattaacccaccttttgatgtgagctagtactatgacttgctttgaataatagaatgtaatggaagtgatgtcgtgagttttaagttcagctcaagacacctgctgtttctatcttgcacaggagagctttccagcacctgtgataagcctcagcccccctgctggataatgagtccacatgaatggagacaggccccctatatctgccaaacctattgatgctacagagatgtgagggggcccacctgagaaaagctgaacctgcccagtacataaagaccactcaggtgggttaagcacaatttgctgtcttacagaatcataaggagatactaaaccattatttgaagtcattaaattttggaatactttgttacatagaaaatctgacagataaaacagccttcaaaaaaattgtgtttttcagcaatgtcttagtgcttctgtggctcacaggctcccacatgcctggagtgctacggggagaaggttaaatgaatgaggaaaaattgacaggctttcccagcccaaagcatgatgttattatcattatcattattaatatttgtctttatgtagcagctaccacttgggaatagatgctgtatgtcagacaccagattgtatttaactttataattgcacttatctatcatttcattttaccatattaactatcacctaataattttccttctgttttatagaaaataaccttaagactcaggtattttgagtgacttgctcaaggtgctgcagctgataaaatcaaaagcagcatggaatacatatttatcttattacaaaacctatattcttttcactgtgctactctagactctgttattgttgtgaagcacctttaaccactgcaagacagaagtcttggccttcagagtaaaactttaccagtgcataaagtcagactaaaataatttgaaaatatacagagtcttagagaacgttataactgtttattagaactaacataaattctacctaatttcttagagggctcttaatgatgtgaattataatggcacatcccattgctattttagttatggaatcaatggcatgtcaataagtgctttctgagaaaattgttggacaaagtactattttgaactccaaattttattcccactattaatttatgaagagaaccttttctctttctactagacaaaggtaacaaattagcttttgttaaaatggcatactgttcttctgagtttcatttacttattactttaccttacattaaaattatgacctgaagacagaaggaactggaacaatgttcactgtgttatggccggatgaagcaggaagaggagaagagacaaaactaggttaaaggtagaaatgtcatctgttgggccaggcgtggcctcacgcctgtaattccagcactttgggaggccgaggcgggcggatcatgtggtcaggaggtcgagaccatcctggctaacacggtgaaaccctgtctctactaaaaatacaaaaaattagccaggcgtggtggcaggtgcttgtagtcccagctacttgcagtgagccgagatcgcgccactgccctccagcctgggcgacagagcaagactctgtctcaaaaaaaaaaaaagaaaagaaaagaagtgcatctataatctcttcaatgactttgccttggactttcccttcaccccacaggatgtgagatctgaaactgcaccctcaacttcccatccaagatgcaattctaatcctacatttaacaccctaacttcttaactggagttgagttatttaaactgtaattttaataggtgaaattctggactaccatcccaaaacattttgttcatttgccaaagtcctaaggaatttccattagatacaaagcaggtaagtctggatacaggaaaaaaaataaaaacatgttatttgctacacagcaaaaaggatattgagtggtaaagggagcacatctcaaatgggacctcaaaaaccctcttcattcacaatggcaggagctagaaagaataaagccacctatagggtcaaatatctctcctaatcatgttaaggcactggattctgaattcgcacagaaggagactctcacccatcactcctcacaaggactcatggcttgccccatagcatcacatctgtgctgcttaccagctgtgtgaccctgggaaaagtccttcaactctctgggatttaatgtcctccttggaaaatgagaatgatattaaaatatgacaagtatatgtaaagagtccaggaatttttcattccaagtacagtatatgtatattcctcacaactgcctaatgaggtacctcaatgcctccagccaaagaccagcaggagcatccaagcaatgaacaagttgactttattattcattgcaatgatggataaaactcaccatgagaatcatgcagtaagagattgttggaaccgaataagtagaaccaggagaatacatatattaagagaatgatgcaacgaattaatttttgcatctgtaggggtgggctaggcaaatcagagatccactgggtggtagttgtcaggaagggcaggctggaactctcagcacaggctgacacgctgtccagagtggaatttctttttcctcagagaaacctcagctctgctcttaaggcttttcaacagcttagattaagctcacccagtttttctaggataaattcttaaagtcaactgattatgaatttcaatgacatctacaaaatatcttcacagcaacacctagattattagtgtttgatttgataactggggatcacagtctagctgacacataaaattgaccataaatcaattgtaaggtttgtgcttgttttaggtgattttggggaggatttaagaatgagagattttgcttttagttggattctgacagaaagtggagggttggggtggcaatgttatgattgggtagcttcataaatcctacctagagggacagaagactatcctgaggctacagatgtgatggtaaagaagcagtaatcactcccgagagagacatacctggtcatttttgtggtttggacaatattcatgttttgtctgggttcagacatgatgactgagcattctggtattctgtctcaatccactgtgctcacagaatccactgtgctcacagagtacttgtctgattctgatgttctgtgaaatcctttatcttcaataggagaaccaaaaccacctgggagtgccagcctagctcctagcaaccccaaggccttgttaattgcaaccaggcagctctcaggggtcaggacattttttttgtttcaccttttttttttttttacagtctctgccagtgggaggtaaaacagtgttgagaatctcagaaggccatttatcaaggacagagtgattctaaatagatcttccattaacttacggtttctatcatatacagaaagtagatgtatctgaaaaaaataataagttttgttctaatgactaactttagctcaatccctagtcccttgcaaatatttggaattttagtgtggtaggataacaaattttaaaagatctggtagtttaagaaaagaaaaccatttttctaagtcagtgcaattcttattctaccctcaacttttgacttgacattcttaattaaaaaaaaaaattcttagagtaattgagccagccaaattttaaatgtaatcaatgtccctaaatttcctttaaacatatgcaagaagcaccaaaacacagaacgtaaagattactcaatgtaaagaaaaactgtataaaatctcatacagttactgtagacagcaccatctggcattataacctttttttattgccgtggccaaaaccacctggatcttttgagagcttgagaataacttaccaaactggatttatacaagtagaaaaggcaaaggtgttgatcggctaccaccagcagagatccctaggtaggtggggtcaacttaacatttggagaattccatatgcactatggaagcaaaaagaaaaagcaactaacccacatacagaagccagagaaaggggaggggatggggactgccagggagggaaatcgactcagggaaaaattcctggaggttgtaactcagaaaatcctgaaggatgccgtataattgatgatgtcatctatccacgaggctgctcagaaatgcccacccctggccagggcggtggctcatgcctgtaatctgagcactttgggaggctgagatgggcagatcacgaattcaggagttcgagaccagcctggccaacatagtgaaactctgtctctactaaaaatacaaaaattagccgggcgtggtggcaggtgcctgtaatcccagctacttgggagggtgagacaggagaatcacttgaacccgggagtcaaagtttgcagtgagccgagaccatgccattgcacctcagcctgggtgacagagtgagactacatctcaaaaaaaaaaaaaaagaaagaaagaaaaaaagaaaagaaatgcccacccctcttgccactggcagacatgcacacaccagagaagattccgatttcgtgtcctccctctattcacagaacatttcctcaagtccactctgagtggaggctgcatcacaacaaggggattgccctgtctccttccagggctcttaatacaaactcttcaactagtaactgaggtgtcatcataggggatttttctaattagccaaaacctgacttggcagggtttggtttgggtgtcttcagattgccttgtctcgaggtcctcacaattgctctacaactcagaacagcaactgctaaggctgccttgggaagaggatgatcctaaacaaagctctgatgctgggggcccttgccctgaccaccgtgatgagcccctgtggaggtgaagacattgtgggtgagtgtatgagtgagggatgttctctggagctggaagagaggaaattgaagcaaaagagagaaagcgatttgcagagaaattgtagagatttcctaagggtcccttcagtattaagagatttaaaaattatggctgttcctccttcaggaaaccagagtcccaacctactctttttgttatctatgctgttggcgttcactaaggatgctattctgtttatattgtattcagtgactatagcctggaggtctctatgtcattccatcatgattgcctcaaaaattagtgaggtttccatcaatggataattttttattattaaaaatttgtgaagtatcattctcaaatttccctgaacaacttttgaagcttttcggatgtctcctgtagtagcgcttggggtaaatgattccatcaattatatactctatagatattaagaaagatgcccttttctttctctcagacttactaacatttccacgtgggaactggcacaggtggggagtgggtaaaggagtccagcaggctgaatgccttcaacaatcattttaccacatggtcctcatttactctcagctgcctcatatgtgtcacctcacaaataatcaaataaaattggcatgtagctaagctttgtaaatagtgaaaacatgaatgtcaattttatttttacatatttctattataggtatagcttcacatttcttttcttttgcaaaataaggtatccttttattttaaaattgagaatttatagtagaaaaacttggtaaattaaatcattttattctcaaattatcaacccaaattacctgttcttcaactcatctaatgaagtcctataaaaagaaaagtgggccagacatggtggctcatgcctgtaatcccagcactttgggaggccgaggcaggaggatcctttgagcccaggagttgagaccagcctgggcaacatagcaagacctcatctctacaaaaaataaaaattagccaggtgtggtggtgcatgcctgtggtgccagctactcagaaggctgcagtgggaggactgcttgagtccaggaggcggaagctgcagtgagccatgatggcaccactacactccagccagggcaacagagagaaactctgtctcaaaaagaaaaaggaaagaaagagagaaaggaaggaaagaaagaaagaaggaaggaaggaaggaaggaagaaggggaagggaagggaaggaagggaaggaaaggggaggaaagaaggaaggaaaaaagaaaaagaaagaaaaaagaaagaaaaagaaagaaagaaagaaaagagggaaggaaagaaagaaaaaggaaggaaggaagcacagattaattattaatcatttggtctctcttagtcttctctgtctttgtcatccatctatttccacctctcttcatgcattcctttctccctcttccctttcaggatccatctctgactccctgcttctttatatggacagtggggtttgtaaaacaaaagttgaaaaatcagatagttaaaaggtgaagtgaactggaaggtctaaacttccacaaccttattaaccatggctgctcccattctgattttgttcgacggtggaagtttcacctccttctccagagcacttggcttctttgttccaaatttcctttcttcaacctcacaccagagtgccctggtcaggctcggctcatccattaggcacaacatgggcaatgcagagaaccctccatactgtaaagccacatgagaatgttttaactccttttaagattagaaaaaaatgaaatttcagagcctaagaaaatgttttaattcagcctagattgtattgtctttataccaattcagtcataaaatacaattttccatattttcatggaggaaggggcccacaaaagcaagagtgctcagggctcacatgtcagaatgcagccctggtcatggctgatcctggccttcttatgattctgctagtgtgcctgtccatcttccccaaaatctatgtcgtcctcaaatatagcaactgtaattcaaaacacgtttgagcacacagtaagctaagttttaaggattcaaagatgaaaagtcatgctgtcttccctgcagagggtgctcagactagtgacggaaacggtatgggatgcaggaaagcagaaggccattgctgaccagggcagtggactcagcagaggctgaaactatacaaatgacttggttccagctgggccagcagggtgacatcctccagcaaaactcggcacccaagacaagtcccagatgaaaagaaggattgctttgtgtttgataaggagtcaaggtttattgcaaggataaggctttgttggtggcctgttaagacaatccagggcagtcatactggataaggaagaaggtgagctggaagaggaacagacaaacagccagatattgaggtggaggagctggaggtcataacgtggtcaaaaacatgtcgatgagaggacttagctacaaagttgttaacttaagcagaaacctcaaggatgaattttaggatttctccaggaagtcctaaaagataatttcatttcagggagaaaaacaacaaaccactggaaagaccagggaacatgaaaggataatgtagtttggtttgcttggcagatacttatgaaggatgttggactgtaaggctgttgatagcctcctcacagaacatgctacagtacattgtatctgctcccttacctacctgactcttccactcttcagtttgttccttaatggtagaccatgcctgattggtgttttacacatcccctgctatgtctgacacttgtggatgctcagaaagtggggaaggaaggaaagatacaacggtaaaaggcttacacgtcttgacaggaatgtccagttcggctcatttggctggagccacattgcacggctgccattctgctctggcatcctcagacaagcacactgcccattagaggaaaaagggtttaatttacctgagtcctcaagtgaatataagtgttaagtcagaacactgtagacatttagtaacctccttcagaggaaaaaaaaaggtggggggaaatgacagaaatccaaaaactagtagagcttccactcttcatttcagaagaaatcagttgctctcctctaaggaccattactattaacaaaacagagaccttgaaggaggcattgtttatttattatatattttgtaatgttattaccattcttgttatactcttccttataccctacaattgttagcagacattattttaaattaataagatcctgcatgcttttcttttttttaaaaaaagaaagacctctgtgtagagtgtcctgttctgagccagtcctgagaggaaagaaaatacaatcagtttgttattaactgatgaaagaattaagtgaaagatgaatcttaggaagcagaaggaagtaaacctaatctctgactaagaaagctaaataccataataactcattcattccttcttttgttcaattacattatttaatcataagtccgtgatgtgccaggcactcaggaaatagtaaaaactggacatgtgatattctgcccttgtgtagcgcacattatagtgggaaagaaagcgcaattttaaccggacaactaccaacaataagagtggaggaagcaggggttggaaatgtccacaggctgtgccaaagatgaagcccgtaatatttgaaagtcagtttctttcatcattttgtgtattaaggttctttcttcccctgttctccaccttcctgcttgtcatcttcactcatcagctgaccacgtcgcctcttatggtgtaaacttgtaccagtcttacggtccctctggccagtacacccatgaatttgatggagatgagcagttctacgtggacctggggaggaaggagactgtctggtgtttgcctgttctcagacaatttagatttgacccgcaatttgcactgacaaacatcgctgtcctaaaacataacttgaacagtctgattaaacgctccaactctaccgctgctaccaatggtatgtgtcaacaattctgcccctctttactgatttatcccttcataccaagtttcattattttatttccaagaggtccccagatcttctcatggcaattgctgaaattttatcatctcccatctctaaaatcacatattcccatgtaatacaagggtctttccattatccattcattaaatccttctcggagaggtctcatcaacctcctactttattaaacatgcccacagagagaagggcacaggaataaagcgaaggcaatgtgtcgttgctcccaagcagaaggtaaataagacctctttgactatcaggtggtgaaatgctggtaggagggctcttccaggatgtaatgcagaagctcatggcagagctattcacacttcacatcagtgctgtttcctcaccacagaggttcctgaggtcacagtgttttccaagtctcccgtgacactgggtcagcccaacatcctcatctgtcttgtggacaacatctttcctcctgtggtcaacatcacatggctgagcaatgggcactcagtcacagaaggtgtttctgagaccagcttcctctccaagagtgatcattccttcttcaagatcagttacctcaccctcctcccttctgctgaggagagttatgactgcaaggtggagcactggggcctggacaagcctcttctgaaacactggggtaaggatgagttccaccactttttgatgctttcttgtctgtcaagttcagaacttcctgccttttactcctatatcccaaaacttgttttccacacttcatgggtttctttctttcttttgaaagaataaagcaacaaaagcaaagatttattgaaaatgaaagtacacttcacagggtgggaacgggcctgagcataggggctcaagagccacttcatggttttctaatgatagacttcactctcctccctaagctggggaccttgagtctttgcagagccaaccctccaccccatcccatcccacacacatgcacatgagcacactctgctttctgacctcaacgacttcatatccacagagcctgagattccagcccctatgtcagagctcacagagactgtggtctgcgccctgggattgtctgtgggcctcgtgggcattgtggtgggcactgtcttcatcatccgaggcctgcgttcagttggtgcttccagacaccaagggcccttgtgaatcccatcctggaatggaaggtaagattgagatttgttagagctgaatccgcagtatgagaggaaggaaagtggaggaggctgtggacatgaatggttgaaagttgtaggggaattgggaagtggcatgatgatgacataggagcggcctaggacccatccatctcatgtctgtcctgttgcaggtgcatcgccatctacaggagcagaagagtggacttgctacatgacctagcattattttctggccccatttatcatatcccttttctcctccaaatgtttctcctctcacctcttctgtgggacttaaattgctatatctgctcagagctcacaaatgcctttgaattatttccctgacttcctgatttttttcttcttaagtgttacctactaagagttgcctggagtaagccacccagctacctaattcctcagtaacctccatctataatctccatggaagcaacaaattccctttatgagatatatgtcaaatttttccatctttcatccagggctgactgaaaccgtggctaagaattgggagactctcttgtttcaagccaatttaacatcatttaccagatcatttgtcatgtccagtaacacagaagcaaccaactacagtatagcctgataacatgatttcttagctgacattaatatttctttcttccttgtgttcccacccttggcattgccacccacccctcaattaaggcaacaatgaagttaatggataccctctgcctttggctcagaaatgttatagcaaaaattttaaaataaaaaagtaagtctgtactaatttcaatatgacttttaaaagtatgacagagaaatgggttgggataaaggaaatttgaatctcaaaaatatcaatagtgaaaagttattctcaaaactttaaatttgtgaagaatgatgacagtagaagccttcctctcccctcctcaccctgaaggaataaaatttccttaggcaggaaaagaaatggaagtcagaaaaacattagaataagacaataatgtgggtatctgaaaaggaacaaatactcattcctcacatagggttagtgacaatggggaaagggatgggagtagaagctgcagacatatctaggagccctagaatagaggcacagtctgccccacctcctcaatgaagctttgctagataaccatgtagctttccctgtgccagcctggcatgaaggagacagtatagtggatatggctgcaagatgtttctaggaaacatgccgataaaaaaacaataccaatatcttcagaaatccccagccctttcccctaaccctcctggctaaggaaagcactagcttatgagaaaaaccctaggaagaacaacacagttaagacaatgtagcagcagctgtgggtgctgtgtcctccattggattcgccaactcctaggagaaactctcacagaggaaatgggtcagcagtgatctcatggctctaaacagctatgaaatctgtaaggatatttctatccatgctacctgcatcagtgagtttaaactttaattgtagaaaaaagacaaaacattaatgcagtaattgatacagtatagtttggtgcaaagaaccctaaatccaaatccaggactcagtactttgaagctagtattttaaactttataagtgggtaaagtaactaacatttctggccttatttttctcatccacaatgtaggagtaataataatttccttgcagagttattgatggaatttgaataatcttgatgtatagtcaatgccttacacatagtatataaatacacaagaaaacattgtggttatatttataattaatttatttaaaagaatggatcacgttatatgaaaagtacttttgtttttctcagccccttaatgatttaggagattcaaatgtagagctatgggtgaatttcttttcatatgatcattggaggatattttttttctccagaatgagagaggctgagatcgattgctaagagagctcttaggacgagaaattgtaatatttgactttggttttcaactctctaagaagggatatattccctccttatggcccgtaagtgtttattcaaggtatttcatatgcaacagatgtttatgcatgtttactttgggaaggaggtgaagaaatttcaaggagaaaataatttaaaatgcagactaggaatcagtaagcacagggagtctgaatcagtgatgatcatgaaaatgtccatcacagatcacagaggatttttagggcaatgaaactactctatttgataccacaatggtgaaaaatgtcattatgcatttgcccaaatccacagaatgtacaacaccaagagtgagacttaatgtaaactatggactttgggtgataatgatgtgccaatgtaagtacataaattatagcaaatgtaccactctggtgggagatgttgctaatgggggaggctacacatgtgtgggagccaagtgtatctggcagcagtccccaacctttttggcaccagggaccagttttatggaagacaatttttccacagatagtggttggaatgtggatatgatttggggatgaaactgtgaaactgttccacctcagatcaaaaagcattagctaggttctcataaggaacatgcaacctagatctcttgcatgcacagttaacaataggattcgcactcctatgagaatctaatgccaccactgatctgacagaaggcggggctcagttggtaatgctaactcgcccactgtgtggcccaatttctaacaggccaccagctggtactggtccatggcccagggggttggggtcctctgggatatctctgcaccttctgctcagtttttctgtgaaccaacaactgctttaaaataaagtctattgatagactggattaagaaaatgtggcacatatacaccatggaatactatgcagccataaaaaatgatgagttcatgtcctttgtagggacatggatgaagctagaaaccatcattctcagcaaactatggcaaggacaaaaaaccaaacaccgcatgttctcactcgtaggtgggaattgaacaatgagaacacatggacacaggaaggggaacatcacacaccggggactgttgtggggttgggggaggggggagagatagcattaggagatatacctaatgctaaatgacgagttaatgggtgcagcacaccaacgtggcacatatgtacatatgtaacaaacctgcacattgtgcacatgtaccctaaaacttaaagtataataataataaaataaaaaataaataaaaataaaaataaaaaggagaagaaaaggtaaccaattatgatcccaaatatataaaataaaacttttagtatgaaaaagtcacattcaaatgcacaaatgcgctaagaaatttttagcaataagatttcaaataaatttcatataaatttcaatgattcatgaggcaagaatccagcattttggagttgtgtgcatttgtgtgcgtgtgtgtgtgtgtgtgtgtgtgtgtgtgtgtaatataaggattatactgaatggcaaaatgactagagtcatacagaaatctacaaatgctgcccaactcagactcagtcctcaagaaatactgtggaaagcaaatttaatgatattgcattttattaaaaggttgtattcaaaaagtatttatgtaatgttaaaatagcagaattaaaactaattctaaaaaataagagtaaatttttttgtcagctaaaaatgtagggtcattattgacattactatacatagggttacagatcaacctgcatgattttaaatcatgggatacttaaaaattatttcagttatttgaattatttcagattgtatacataaagtgtgacttcattaatatttaatatcacactatttaaaatttacaaaattagtgggtcacagaggctcgtgcctgtgatcttaacactttggaggccaatggaggaggattgcttgaaggcaggagttcaacagctgcctgggcaacaaagcaagaccccatctctacaacataaaaataaattagtgcatggtggcacgcctgtaatcccagctactctggaggctgaggtgagaggagcgagcccaggagttcagggcttcagtgggctaggattgtgccaccgcgctcgctccagcctaggcaacagagcaagaccccacctctaaaaataaataaataaataaataaattttacaaaattttaaaaatcacatgagatatttcaggtttgtacttgccacaaacaaactagggatttgaagaattaaacattttattttacttacagtctgtactggcacatagtaagtagtcagtaggtgttaacaattagtgttattgttattttctggagaccaactaacaaatcccatagcggatgacaccacagggatgaaaccaacaagatccagaatatgggaacttccactagataactccatttttttagcaacaattcaaagacagacagagagagagagagagagagagagaaagaagagaagagaagagaagagaagctatacatttttaaaaggctgaagaaatatatgaaccaaattgatatgaggcaatcagaaaaattgacaccgactgtattaaggaaatagctaattttagtgtggtaatagcattgctgttatgtttctaaaaagtcattatactttagattttcataataaaataattatgaatgaagtatggtatctgaaagtatcttcagaataacccagtgtgcatgtatgattaattgggtgggtttacaaaattgcccatgaattgatcattgttaaagcttggctgttaaaacatggcactcttctctctaacactgttgaagttttctgtaatacaaagttttttaaaaaatgcattccaggaaagtcccataaacataggcagagaaacattctgtttgaagttatgttagtttttaggcttttctcatttttatcacagttgggaaatcctaagtatccaaatcctgcctaagactataggaacctctcaaaaatgcaactctaaagaatgtgtatgcaagaactaataatagcaaaggaaagcaaagtactttttcctttattattggctgtactaagcccccagacttgtttatatattccttaattcatcaaaactgcaaaaatggtctttgagtaccattatagcaataagtaccatactttgttatacgtatcattaaaataatgtgaaaagagatacattcattgtcttcatagaacttacactctagtgggaagaaatatacatatattacataattccacaaacatataattacaaactctgaataatttataaaggaaaagaaaacaaggtaaagtgagagagtgttgcacaggaaccaggtataatttgggggagattagaggtggctcgaagaagtgtatcttgagatgaaataagatggtatacagtaggtaaaggacaaggttgaggcagtcagagcaaatgtttgagaaactcttacaacacgaaagagaagatgagaataaaataacatgaaaattatcacagatttaatatggaaagctcatgtaacagcaaacaagtttaaagtctttctaattagaattcttaatctgtaagagtaataatagaatgctataaacaattggaaaatttaataggaaggttggaaaactaagtcaagaaatatgaaaaggcaaaaattgtacctaccacacatagttttattagaagttgactaagaatattacttagtaaagtggaattgttaatcaggaaatgggaagataaggaatccagaaaactgaatttaatgcaggacctcactgaaaagggatcctattacagcagttccttggcaagcaaagaacgtctgatacatgagtgatatttagaaaatgataaactatttttttcaatttttagaattaagctacgagcaaagcccaagtatgcttattgttacagcagaatgtcaaaatggtcagctttgacaatattgaaaaaagggtgcctgtatctcattttggcaagtggaagcataaagtgtaggggaaaggaagggtatcaatgccaataacttcatctcccaagaagcagaaaagagacattgcccatagttaaggaagaaatcacaaagatcactacatttaaattacatttgtaccaaaagaattatgtaagatggctcatgaattaaagcagggttttagaaaattggactatcattcagtcaaaaagtcttcaacctaacccccagggagttctgaagctgtaagatcccttcagatttggctcaatttagggaaagggtttaggacatttataccccaacactgaccagtcattataggtgggttcttcctgggaagtggagtaaaatctgatgaggctgctttcatcacctaaagcaattctgggggatgactgacagctaagggctgtcagccagcaacattcccagcagtgagagaataaatccttcagtcccaaagggaggagtttaggtagaacagaacagcatccacaacagaaacggtgttctagttcctgggaatacgtatatattcatgtagaagaaaacaaacaaacaaacaaaatatatatatagttttattttgcagtctcgctctgtcacccaggctggagtgaaatggtgtggtctcggctcactgcaacctccgcctcctgggttcgagcaattctcccacctcagcctcccaaatagctgggactacaggagaatgccaccatgcccggctaatttttgtatttttatttttattttattttattttttatttttatttttattttattttatttttttttttagtggacacaggtgcagaatgcaactaaacctatgtcatgttagatttcgctaatgtcttttttttttcttttttttttttttttgtatttttttttttatttatttttatttttttattgataattcttgggtgtttctcacagagggggatttggcagggtcatgggacaatagtggagggaaggtcagcagataaacaagtgaacaaaggtctctggttttcctaggcagaggaccctgcggccttccgcagtgtttgtatccctgattacttgagattagggattggtgatgactcttaacgagcatgctgccttcaagcatctgtttaacaaagcacatcttgcaccgcccttaatccatttaaccctgagtggacacagcacatgtttcagagagcacagggttgggggtaaggtcacagatcaacaggatcccaaggcagaggaatttttcttagtgcagaacaaaatgaaaagtctcccatgtctacttctttctacacagacacggcaaccatccgatttctcaatcttttccccacctttcccgcctttctattccacaaagccgccattgtcatcctggcccgttctcaatgagctgttgggcacacctcccagacggggtggtggccgggcagaggggctcctcacttcccagtaggggcggccgggcagaggcgcccctcacctcccggacggggcggctggccgggcaggggggctgacccccccccacctccctcccggacggggcggctggccgggcagaggggctcctcacttcccagtaggggcagccgggcagaggcgcccctcacctcccggacggggcggctggccgggcgggggggctgacccccccacctccctcccggacggggcggctggccgggcgggggtaatttttgtatttttagtagagacggggtttcactatgttggctaggtttgtcttgaactcctgacctagtgatccgcccacctcggccttccaaagtactgggattacaggcgtgagccacggcgccccacccaaataaatgttttttttttaattcatcatctatttaaaaaataaaaatagaactaccacatcatccagcaattccactgctgggtacatctgcaaagaaaatgaaatcagtgtatcaaagaggtatctgtactcccatgttcatcgcagcactactcacaatggccaggagatgttaacaacttaagtctcaatcagcagatgagtgtataaggaaactgtggtccatatacacaatggaatactattcagccttgtaaaggaaggaaatcttttacattttttacaacatggatgaacctggaagacattatgttaagtgaaataagccaggcacggaaagacaaatactgcatgacctcacttacctgtggaatctaaaaaagtcaaaatcatggcaggtcggggagtgggggtagcagggagggggacaaggaggaatgagaagatgttggtcaaaaggtacaaagaagggcagggtgtggtggctcatgcctataatcccaccactttgggaggctgaggcaggtagattggttgagcacaggagttcaagaccagctgggcagcatggtgaaaccctatctttacaaaaaatgcaaaaactagccaggcatggtcacacatgccagtagtcccggctactccagagactgaggtgggaggatggattgagcccgggaagtgaaggctgcagtgagctgtgatcgtaccactgcaccccagccagacctagaccccgtttcagaaaaaaagtacaaagtttcagttaggcaggaggaataagtactgaagatcgattgtacagcatggtgactacggttaataataatgtacagtcgtccctcggcacccacgagggatttgttccagtaccctctctgtataccaaaatctgagaatgctcaggtcccttattaaaaacgtcttagtttttgcatataaactaagcctatcctcctgtatactttaaatcatctctagattatacttagaatacccaatgtaatgtaaatgctatgaaaatagttgttatgctttattgtttttgaatcggaattatttttatagttatattgttagttttcatttttttctaaatattttcaacccacagttgaatgaatgagaggatgtgaaacccacagatatagagggccaactgtattgtatatttgaaaattgcagagagagattttaaatattcataccaccaaaaagtgaagtgatggatatgttaattagcctggtttaatcacatgtatcaaaaaaatcacacagtaccctgtaaatccacagtgatttatcaattaaaaataattaatgagttcaaaattcttttggagtgtaacatccttaactttttcttgttcaaataaagttttctgtttttttatttttttaatttgttttaaaaaatcatctcttaacttccattaactcagttgattcaccctattaacttaaggactctcttcttccttaagttaaacatttcatgataatcaggaagggcaaggttatgctgcaataagatcttaacccacagtaaaaagtagatctcagtgacttaactcaataaggagacttaattccaccgttattcaaatgactcagattatggagtttccagcatctcatacaccaccatgcacctacttgcaagttccattggttactgttagtcaaatgtccccaacctaacagcggaaaagactgagaaatgtacaggagctttggaatactggtaagcatcactgtctccaaaagttatactgttattatctaaggtaaggacaaatgctcaagaccagtaggttgtcctctagaacacccacacgctttcctccaagttatatgctgagtaagactcagttctttgtgttagcaaacttatttatagacgatgtacttattattttaattaattatccattaaagattatactatccaatgaaatctgggtgcaaaacatagttgtttctatgaaactgtcaatggaagaaagagaagacgattttgaccctctcgttaataaagaatcttccagcatgtgtgctcagtgtgacaatgttgaactgtaagaatgtcctagaatataatctatcacccaccccaattatagggcttatgcttcaactagaaaaatcagatctcgatgttcccctaaactttgagtcttgttcaatccctagccctgcctcttccctttgcagggccaaaagccaggagctacacacagagactgaggacacgctggacaacccagcacatgccttccccatttccccaaaagtgttactcccttttgatccctatggtgaatgacagtgcccaccctgaggaagaggacaaaatcggcacaaaacttttgactccattcagaattttgcttggggaaaattcagactataaccctggggagcagaatctcaagtgttggtgcctctttgtgcgccagtgtccctgtctgaggacctgcatgacagcctggagtacaggagatgaaggtcccaaggagacctagttctccactctgacctcatccataagaaggaagagcctgccaaagactcctcacgcccagtgtgtgggtgagggagaaaggaagatgggatgtctgctttcagggtcatggccttacataacctcgcagaagctcccagactctggcttcatgacgaaactcagagactgagatgtagaccagcttcagggctgggcccacatcaaaggggccacagtgtgtagtgacctccctcataaccgggaaaagagtgtcatcaggaatcaacaggttacaacgtctatgacaaagggagctcagacaaggagtggaatgactatgaacaggcacccccaatgagggaccctagaaccagagggagctctgccatttgtcctgtgggctccacaagaaacaaactgccccttatacccctccactgtgaggaggctgtggaggctgaggtgctccacatggctggtgtagacatctgcacactggaagtcatttccaggaccacaaggatctggaaaatccagtcctccttcctaataagagcgatggacacaatgctggctgtcagcatcccgtgcacaggacaatgtgtttgagaggtgtgcatgttacccaggcttggccaatcagaatctttcctaaagttgttaaaactctggtagacattctagaaacatatattaacagagacagacaaacagacacacacacacacacacagcaagagagagagatgagataagatatgaagtgataaggaagagaaatgcagaaaaatagatgcaaaaagaaacacggagatagaaaaaatgcagataaacagtgaccatggattagaaaaatagaaaggcaacaatgtagtgaaagacacaacaagggggcagagacaaagatgcagagagacacgcagaaagaactatacagggacaaagagacacagaaagagaggcagattcacagatagagatataacagaaagagaggtgaagatctcattgtgtatctggaactagtcacttctgaaatcaacttgactctaggcttcctttgcaccatgaacaaaatatatttgggtttctatcatttagaatcaaaaataatacttttattgctggttatgctttcttaaaagtaaaaattattcttgattgatgtgacttgccagaatgtttgaaacaccagtgaccaagggtcactatatctgcccccaaacaattccaccatgtttacttatatagcactcaccaaaccagaagagaggctgggatattctcaggccactgcactgaacatcaatatgaaagaaccatgaatgatgcaacaactgagttgattttctacctcctctgcccaccatgactttgcaccccaaattctttcagtgtcttttcaaggtacaaccctccttctgggcacaggttggctgggtcacctcaaggtatgttccttcattctgcagtgatttcctgcctctgctcaattaaggaagttcagaatacagataactcaggatcatgtttaattatgtaaaaaagctctaaagtcaggtaatggttttcatgtgcttctcttgagcagtctgaggagagaatagaaacagaaaccccttggggcctgagtagatgcagctggccgtgcacaggcagaggctgtgggtcagtgcaggaagtagggtcacagccatccgcctcaaggtggggatgaaaggagatgacctggtggctgcgtgacagccactgtaggactctgatctcagggggacaggctgacacagacagctgggaattctgggcagggacaagcaggcgttacagaaaagtgataaccaatcccagttaaaatagtctcaggagtcagtgcaggagccctgaagaagagagaagagggatgatcagcacagggtacgctggtgggcctgccatcttccccacccctcaggggcctcctgcagcttcagacagacaaagctgaggtccagagtgtattgtcatcacctcccccaagatctgtgcaaaggtgaaatcagctcatgaagacacagaacttcagcttgatgcagatgtgtgggaggtgggggaacagctgttactcttctggtgaatatgaagggttcaatctttttaggaaattggatgatacctcatccctaccactagcagcctctttcagtcactggaaaatgcctacaggcagtagccaccatcatgtggcacaaagtgggcatcatcctagtgtctaacatttaagccgtggttctggctccacatttaacaggaagataccaccaaagttaaggcttggttctggggaacaacctctggagattcctagaaactggcaaacttcacccctaagtcttgatcctcatagcagcaaatataccatgaacagagaccactactgtcaggtacactcagctcatgctcttccctcttacacctgtgccctccccacactggatcacggctgaaatattacctgctggtggaggcccttgaggtcttacaaaaggaagttatgcagagaaaggtctcattacatgaacagccactctctcaccccaaaggaaaatgacacatgtgacttaattagagttatattctcttcccattcatgttcttcaagtccttaagcaccctaatttaaaatcccctaaaataaaggaaattgtcactagaaggcaaggaggccgaggctctgaccctcttaatggaggaagtttttggaaaggagccagtgagacaatgatgaatggtaaggatgccctggaataagctctatcagtcagctctgtgacagggctacccttcagctagtaaaatcagattccaatgcctcctccaaccttgtcctgtctccttccacttccagctcagctttcttcctctcagggtcaggaggaaagagctacatctagagacaggacctctctgaacagagggtctgggtcacaggccatcttccccttttcccctggggttcctcacctttctgactcctgtgatggatgataaggcccagcccgaggaagatcagccccagcacgaagcctccaatgccactcagcatcttgctctgggcagattcagattgagcccctgagaagcagagcctgagtgtcagtgtttgtccccataccccatagtttccctgatgaggagctgaagtccagtctgagatgcaggaggtgaaggcatcaaaggaacctagttctccattcagaccacccctaagggagggaaaggccagccaataggtccttggatacagtgagtaggtgacagagtggggaagcagatctccactcctcaggaactcatccataaacttagaccctaagatcccagtcaccagccctaataatcagttcctcagagcaatcaggactgggatccagagcaacagtatgtagagtaatttccctagcatctggaaaggtgatgagatcaggattcttctgatgcactcgccatggaactagaggtgctctagtctcctgtgattcccagctcagcagtgacatcagggataagagatgggaagggatgggtcagaaggagctctgtcctttgtcttgtggggcccacagtaacagaaactcaatatccccttacgccactccacggtgatggggctctggaggctggggtgctccacgtggcaggtgtagacgtctccacgctggggagtcatttccagcatcaccaggatctggaaggtccagtcaccattcctaataaggggggtggacacaacgccagctgtctcctcctggtcattccgaaaccaccggactttgatctgggctggatagaaatctgtcaccgagcagaccagcaggttgtggtggttgagggcctctgtcctggatggggagatggtcactgtgggctccactgagggcagtaacagacagggaaagatataggagtgagatgtgagaccacacagcatgcctgctgtgaggaaggtccctccttggaaccagagtggaaagatacttggagtccaagtcttggattaaggttccttcaacaaatataaatataacaatcactgagaatccaaagacaaacaacataccatggtccctgcctttataaaatgtgcaacctagtaacagacagcaaaaaacaaaaagaatgttatttcaaaagtttgtaatatttgaaaaaaatttaggcaggccttgaaaacaaataacactgatcaaacatcatgtttgcccgtaactcgattcctttatcttctcagattgctgctcatagtaaaaatactacacccctttacacatctcatcctttacctttcaggccactttattgcatttcctttattctcttagtgtgaaactatagtaaatatttaatgtatgctttctttatttagtaatatgttctctcattttcttttttccttaatttctttttatcacacaagtgagtttaattacagctgtctaccctactccatccccttgctattgagaattactttcttcttctgaaatcaggcattattatgtatgttctccatagaaaatattctgagatctgtgcagtggtcggtctgggttaatgatcctgtaatgtgaacacataaatatagctgggatttgctgaggtcaccaggtggcaccccaattaaatggcactcatgagccatcatctggaagaaatcacggtttctgcttggacttgaacttttctttaggttctccttcctggagtccaacagaaataacagtcagctatgtggccttataagatttgttcatcttaaacagattgggagtaaaaatagagggcataaatttatgagaaaagatgataaaataaattttatggaaatggaactgaaatagcaaaaacataagtatttgctggcattaggatgtgaatcaaaagaaggcaagggagtattaagtaaactaaaggttttgcaaacctgcatagataacactggggtcagactagggattgattaatcatgaattttcaatgccttgaaagtatcattttgtcccattaacatggaaaacacacaggaatagactcattgctgcttctggtcaaaactggctttaacgaggctttacgtcccttagactctatggatgtgtagtgaagaacacaaagaatgttgtgtactttgggaggcttaaggtcttggtgagcaattatgggctgattacttaaagtgtttatcatgtaccaatattagcctacagtgaccatctccccatccatgaccaataaagtgtttatcatgtaccaatatataaagtggtgatgctaatctctgatgcacaagtaactgtgagattaaatgacgtaacatagatggtatttgataaggcaactgtctagaaataaatgctcactaaatgggtaaaattgactttcagaatgtttattcctgaagtggatagtcatggggggaggggagaacctaggccaaaagcaacccgaaactatttttatccaataatttaatggcttcaatctatttattccaaaacttttgctctttgcattgtgccatttgttcagcttttctaagaaattaaaagtgccggccgggcactgtggctcacacctgtaatcccagcactttgggaggccgaggcgggcggatcatgaggtcaggagatccagaccatcctggctaacacggtgaaaccccgcctctactaaaaatacaaaaaaattagccgggcgtggtggcacgcgcctgtaatcccacctactcaggaggctgaggcaggagaatggcgtgaacccgggaggcggagcttgcagtgagccgagatcgcgccactgcactccggcctgggcgacagagtgagaatccgtctcaaaaaaaaaaaaaaaagaaaagaaaagaaatttaaactgccttacaatatctttcaagcgttgtttttatttttagcaaaaacttttttcctcagattttgtattcacaaactctattaagatccaagtcaataagagtttactttaaagcattaagcaaaattatagaaaataattaataaagtccatttttaaggctctgtttacctctttttttttcttgagcctaagtggatgggcagctgagtacatttattcattaatttaacagaagatcattgagctcacaccacataccagtcaatgtgtcaggtactaggcatgcaatgattaaaacaccctcacctcaaagatctctgccatgaatgagagcatttaagaaaacagaattacgatgaataatgatttgaagccaaaagttaaaatatcttatttcacaactgtaattgctgaatgtcctgcgcgcagttgtggaacagccctaactccaccaggctaagcctgaagcttcctgctgcaagagctgtgcacgtgggccttgctgggtggggcagtgctagtggggcgggcgggcgggcaggggaagagggcgggcattctgagcagagagagctgcttagcaaaggtaaggcaaaaggaggcaaatgcataaggcacgaggcaagaacatgcagagcagaggacaaggccgacgaacgggtaggctggggcgacactaggcagcctggccaactctgcctgtccccctgctctgccctaggtccccgcacctccgatgcacctgcccccaccactctcgccgctgcctcctgtcctctggggtggaacaaacggggctcaggttccagaggccacgacccttcgcccctcctggcgcagagacttggggccaagggtgggcctcgcagaggggcgacgccgctcacctcgccgctgcaaggtcgtgcggagctccaactggtagttgtgtctgcacaccctgtccaccgccgcccgtttcctctccaggatgtccttctggctgttccagtactcggcggcaggcagccccagcagcgtcaccgcccggaactcccccacgtcgctgtcgaagcgcacgatctcttctcggttatagatgcttctgctcacaagacgcacgcgctctgtcccgttggtgaagtagcacatgcccttaaactggtacacgaaatcctctgcgaggaatcaccggccagtcagtgcggcccagcccgtccgcccccgcagccgccaccctgacccggcccggagctgtggaacagcccgcgcgaccacaagttcccgccggcccgtgcctcgcgctgcagacctgggatcctcccggcggctctgcccagccctgcccgccctctcggggtcttcgggaatccgccttcctacaggcaggaaagggaggaaagccctgtccctgtctcggcctgtgaaccaagtgaagaggcagtcgggctgattttacatggacctctgcacttagagggatcagggcgttctcgcatgaaatctcattttccatggagctcctgggtacctcagagataaagttatccacataaacctgacagttcaagggaatgacgagacaggtccaggaattaaacctgtcctcttccgatacgcctattctcttggtccctgggtaaaataccttccttcccatgcctggatttaccctcccaagtgccctgtgaggttcactcacgtctgtgttagaaagaagggagtcctagatctctgagtcctagaaagaaacatttattcaccgaaagagcacaagcttttgaatttgataaactagattcccattaaactgtggcagtcaccagcccgggcagtttatgtaacagaatatccatatcacaagtataattgtgtaaaagaaaatcatgatatctacacacaggatgttagaaggagtgagagagaatttatgtaaagtattgttctgtgtctgaaatgagtggtttcacagtatgtgttatttcccttctttacatcctcctttctactaaatttagtccatcatcaactcgggtatctgaatcccactcaggtcaccatttgcccataaatcagtgaaacctgaaggctctctttctgtggtcagccagtcagcttccctcagtaccaagattttgcctccacaaacgctccactgggtcaggaatacagacaacttttccccaaatacggagactacagacaccattgctgccttgcatttcccaatgcaggaaatcataatatttagtccaggcaagtcttgggacacgcctaaatggcaaatcctgctgtgtctttggagaaattcatatcttcaaaaataaccccatgctcactttgtcctatcactggtagtaaatgaacactttgtctcctcttttctctcctctctcctcctcttccaggcttaagcctgtaggatgggattggattgtcctcacttcatcattaaaagataaatggaaatgcaacatagctctctttcccaaaacagaggaaatgttgataaaagattgtgtccgagattatggagatcaccatccccgtaccccagcccaaggagagcctgttcccagagtagcggctctggagagcagctgccctgcacttaccgggagagtctctgccctcagccactggggtgctcagcatcgacagcatcaaggtcacagttgctgcccgaaggcctccggggatccgcaaagcctttttccaagacataattgagacgaagggaaaagtggtagtcaacacagctcggacctgatggatctgatgtacctggcagaaagaataaaaatctgtggatgtttccatgcgtggtaggattggatggtcccttggaaaggaaccaatcagcactggagctgaaggacctcagctgtctctgggcagattttttttttgtgaaggttctgaatccagtgcctggcactgtgacgtctttcaattgcactggatgaacatttgaggtgaaaatttcctctcaattatggaagagctgaagattgaatgcctaagggattttaagaagccaaagaaaaatgcgattcaacagtaaacatctttgtaatattgattaaaaaccagttgttcttatacttgggattctttcaatagggcaaattaagtggggatcatatttcaggggagagaaaattgctgtcatagacatttttactgctgttgtcttagacacaccctgaggagccttaagttttggtgaaaagagcaaagttcttagaaggaaataatggtgagttgcagttccaccactaatgtgctttatgagagtcaacaaattactgaatttatttttgccccaggcttctctttgtaaaatgtggatcatgtttcatgcattttacatctagatcttcacatatacaaatttaagattaatatgacttgtttaatgttacaaaaggatcctcaactgttatgtgtaactatcaggttaatatgtggaacaagaaaacaagccaaaaaaaattgacacccatccctgctggtaaatgattcttcattacgcaagaatatattgtatttatactcttcgagtgaaagtatttgaaaagttaattaagttgacattccttttctaagttcttcagctgtttaaatcctctctgaaccatgaaataggtgcatctgatatcagcaaaggcacaatacacaaacctttacagtattcagatatagtcatgtctagatttgaggagagagagcaaaagctgtggagaagcatttcctaggtcctgaatagtattaatgatggagaaaatgtttagagtcacagattgtactgtgccagccctaaacatcaaatcccaagtggcagaggtatcaatgtggtttttttcaattctatgtattttttatttaacagttcctcatggacatatctacatcaatgtgtttttataaataagcataacttatcaagctcctcttggcagtgactagggacagtactaatggttataaagcaattagaacaatgcctggcaaacattacttctgaccccaaccaagacaataaatatctccacctctcttcttctctccctttctctctttcttttcccaaaattttaggttctgcttttaaagtagagaatacaatctaaaatcagaatataagtttaccaggtaaaaagaagcagggaagaggcaacagcaagaggtttgcaatagtggcacatgaaagcgttgagccactccaatattctgtattattcacagcataattctagagcacctgagactgggaaagttgccactgggcgtccagcagcagtggtttactcaggatcagggtaaacccagcctaaggatggtctccactgctgtgatggacacataaaggaggaaccatactcacacctggaatggagttggggcaaggaagagtaggcagagagacctgaagctgccctcaatgtccttcctcagcccccacctcagtgtccctcagaatagaggcctctaatccatcctttccttcctgtctaagggaaaaacttcccacaggtttattctgaggcaactgctacgccagacctggggattcctcagtctcacaggcctcttcgcacagacttttcagctagcaacaagtgtcactttagagcctttttctgattggctaaaacctcactggaaaggttttgctttgggcttctgccagttgtgtctgcctggcccagccttctgtacagttgactaccctggccctatccctgctgcattattcagggcattcaggcagaagaaggccagagaagaaagaaactaggtcaagcatccttattccgagtgtctcacctgaatcgcctgcccagcctctgtggaggcagagcaattagagcatttaccccatgtgggtaaatgggctaaaaagccactgccattagtagggacggtcagggttacagtaggcagactcaattcaagggacatcctctcttccttcaggttggaaggaaaagttgtggactccttctttgtgaaaatcaagggagaaatcatcttctctggtcaacatctcttggaatctgtgcttggtcagtggaattgaatgtgaacataggagccaccctgtcaccagaaggaccatccaggaccctaccctgcatttacttcaggaatcaagaatcactgtatattctgaaaggttctgtggcttccttaatgccaatggtaatataactagaaatgctgcccccagaatattgttttcctttaattaaaatttatcaagcaattatccttaaatttttaaaaatctttgtgaagcttcttacatatttctcttatatcaacttctaggtaaccagctatatataagaatttttcatggcacatataaactaggtcctttctcttggcacaaagttatctctttaaaatctcagtctagagaatctgaagaaagagccaaatcagtagcattcaggggctgtgttcagacagtgcctcccacaagcaagtggccatggtgaaactccagggtggaagtcatgtcagaattggaggatgatggagcgtgaaggagtaggagtatgggaaaagctttagcaggaaggtagaaaatcaggtgatacaaagcatttggaacatttgagggcaaatgaggaacgtgagtgatcttggcacagaagcccagacctcaccagtcccacggctcctcatgctctatgaaaatagcccttgaagaccgaagaagactgggacaaaaacccaagctgcctgctgtgggtatgctgtacaatgaagctttgtttcctgatctatcttttcaggttcctttttcctgtcagtctcctcatccacgcattgcctcagttggaccactggtgattaaacctcccagagctagcctacacatgtcactctttccaacacacctctgcctgtctctacttctggttccctagtgatgcctgggatatttccagagacagctcttcccccagcctctagattagtagtcaccatgctccttcattcccagaaaaaacttaaatatttctctgtgagatctttataatgtctcctttttctgtaagttcttaccagtaaagagaggccctaatgttcagccacataaaaatatatatagttcttgagtacttaaatccatatccaagtactcaagaactcatgtgtccaagaactcagctcaaggccatggttcatgcaaaacagcaacatcagcagtaatattttggggagagtactcttatatcatcaaataggaaaacttaagatattccatttaaaccacaatgacatatcacctcacatcagtcagaatggctattatcaaaaagataaaagataacaagtgttaaggatgtagacaaaaggaaacatttgtacactgttggtggggatgcagattagtacaaccattatggaaaacagtatggaagttcctcaaaaagttaaaaatagaactatcatatgatgtagtaatcccatttgcaggatgtagacaaagtatttaaaattagcatgttgaaaatatacctatactcctatgttccttgcagcattattcacaatagtcaaggtatagaatcaacctgtgtcattcagtggatgaaaagataaagaaaatgtggtatatatacacaattaaatcctattcaggctttaaaaagaaggaaatcctgttgtaagtcaaaaagtgactgaggtaggtctcaatcaattaaaggtttattttgccaaggttgaggaatacacctgggaaaaacacaaaacacaggagcatctgtgatccatgcttttgccaaagagggttttgagaacttcagtatttaaaagagaaagagcaagcaggaggggaaggagaaaaaaaaggaggaagagtaggccatgatacaagtggttacattcctgagtctttgattagcttaagtaaatctacattttacctgtgaaaagagagtagaagaaaaagttaattataaattatcttatgctcagtaaatctacattttacataaaattaagggaacttgaaaagggggaaggagtagaggaaacgaggttatgacacggggttgtgaaattaccgttatctgtttgggaacaaaaggaagacagtattggtgcctcagtcctcaagattaactttcccttggcataatgagtttggggtcccaagattctatttttctttcacactgttatttttgacaacatgcatgaacctagaggacattaagctaagtgaaataagccagacatggaaagacaagtaatgcatgatcttacttatatgaggaatctaaaaaatcccatttttgaattgaattgtttattttattttattttgttttatgttctagcgtacatgtgtaggacatgcaggtttgttacatgggtaaacgtgtggcatggcggtttgctgcagctatcaacccatcacctaggtattaagcccagcatgcatgagctatttatcctgatgctgtccctgcccctacccctcacaggccccagtgtgtgttgttcccctccctgtgtccatgtgttctcattgttcagctcccaattattagtgagaacatgcagtatttggttttctgttccttcattattttgctgaggacaatggcttccagctccatccatgtccctgcaaaagacataatctcattcctttttatggctgcatagtattccatggtgtgtatgaaccatattttctttatccagcctatcactgatggacatttgggttggttccatgcctttggtattgtgaataatgcttcagtaaacatacacatgcatgtatctttataatagaatgatttatattcctttgggtatatacccaatgatatggtttggctgtgtccccacccaaatctcaacttgaattgtatctcccagaattcccacatgttgtgggagggacccagggggaggtaattcgatcatgggagccagtctttcccatgctattctcataatagtgaataagcctcacaatatctgatgggtttatcaggggtttctgcttttgcttcttcctcattttctcttgccgcagccatgtaaaaagtgcctttcacctcccacaatgattctgaggcctccccagtcatgtggaactgtaagtccaattaaacctcttattcttcccagtctccagtatgtctttatcagcagtgtgaaaacgaactcatatagtaaattggttccaggagtggggtgttattgaaaagatacctaaaaatgtggaagcaactttggactgggtaacagacagaggttggagcagtttggagggctccaaagaagacaggaaaatgtgggaaagtttggaacctcctagaaatttgttgaatagctttgacaaaaatgctgatagtgatatgaacaataaggtccaggccaaggtggtctcagatggagataagaaacttgttgggaactggagcaaaggtgactcttgctatgtttcagcaaacagactggaggcattttgcccttgccctagagattcgtggaactttgaacttgagagagatgatttagggtatctggcagaagaaatttctaagcagcaaaacattcaagaggtgacttgggtactgttaaaagcattccgttttaaaagggaaacagagcataacagttcagaaaaactgcagtctggtgatgcagtagaaaagaaaaacccattttttaggaaaaattcaagccagctgcagaaatctgcataagtagcaaggagcctagtattaatccccaagaccatgggaaaatgtctccaggccatgtcagagaccttcacagcagcccctcccatcacggaaccagaggcccaggaggaaaaagtggttttgtggaccaggcccagcgtccccttgctgtgtgcagcctagggacttggtgccctgtgttccagctcctccagccatggctgaaagaggccaatgtacagctcaggctgtggcttcagagagtggaagccccaagccttggcagcctccatgtggtgttgagcctgcgggtgcacagaagtcaagaattgaggtttggaaacctccacctagatttcaggagatgtagggaaacgcccaaatgcccaggcaaaagtttgcttcaggaacagggacctcatggagaacctctgatagggcagtgtggaagggaaatgtggggtcatagcccccaaataaagtccctactgagacactgcctagtcgagctgtgagaagagggccaccatcctccagaccccagaatggtagatccactgacagcttgcactgtgggcctggaaaagccacagacactcaaagccagcccttgaaagcagtcaggagagaggctgtaccctgcacagccacagaggcagagctgcccaagaccatgggaacacacctcctgtattggcgtgatctagatgtgagacctggagtcaaaggagatcattttggagctttaaaattgactgcagctgggtgtggtggctcatgcctgtaatcccagcactttgaaagaccaaggtgggcggaccacgaggtcaggagattgagaccatcctggctaacacagtgaaaccctgtctctactaaaaatacaaaaaagttagccaggcatggtggcaggcacctgcagtcctagctacttggaaggctgaggcaggagaatggcgtgaacccaggaggcagagcttgcagtgagcagagatggcgccactgcactccagcctggacgacagagcgagattctgtctcaaaaaataaataaataaaaataaaaataaataaaataataaaataaaaaaatttgactgccctgctggatttcagacttgtgtgtgccttgtaacccctttgttctggccaatttctcctatttggaatggctgtatttacccaatacctgtacctccattgtatctaaaaagtaactagcttgcttttgattttacaggctcataggtggaagggacttgccttgtctcagatgagactttggactatggacttttgggttaatgctgaaatgagttaagactttggggaactgttgggaaggcatgattggttttgaaatgtgaggaaatgagatttggagtggcccaggggaagaacagtatggtttgtctgtgtccccacccaaatctcaacttgaattatatctcccagaaatcccacgtgttgtaggagggacccaatgggaggtaactgaatcatgggagccagtctttcccttgctattcttatgatagtggataagtcgcacgagatctgatgggtttatcaggggtttctgcttttgcttcttcctcattttctcctgccactgccatgtaagaagtgcctttcgcctcccgccatgattctgaggcctccccagtcatgtggaactgtaagtccaatgacacctctttttcttcccagtctcgggtatgtctttatcagcagcatgaaaacgaactaatacactcagtaatagaatagttgggtcaaatggtatttctggttctaggtctgtgaagaattgccacactgtcttccacaatggttgaactaatttacattcccgccaacagtataaaagtgtttcttttttctctgaagccttgacagcatctgtggtttcttgagtttttagtaatcaccatactgactggcatgagatggtatctcattgtgattttaatttgcatttctctaatgatcagtgatgttaggcttttttcatatgtttgggtgctacataaatgtcttcttttggaagtgtctgttaatgtcctttgcccactttttaatgttctttttttcttgcaaatttgtttaagttccttgtagactctggatattagacctttgtaagatggataggttacaaaatttttctcacattctgtgggttgtctgctcactctgataatagtttattttgctgtagagaagctcttcagtttaattagatcccatttgtcagcatttgcttttgttgcaattgcttttgatgttcttgtcatgaagtctttgcccatgtctatgtcctgagtggtgttgcctagattttcttctagggtctttatagttttgggttttacatttaagtctttaatccatcttgagttaatttttgtataaggtgtaaggaaggggtccagtttcaactttatgcatatggctagccagttctcccagcaccatttattaaatagggaatcctttccccattgcttgtttttatcaggttttttgaagatcagttggttgtagatgtgtggtcttatttctgagttctgtgttctgttccactggtctgtttttgtaccagtaccatgctgttttggttactttagccttgtagtgtagtttgaagtcaggtagcatgatgtctccaactttgttctttttgcttaggatgattgtcttggctaatgggcttttggttccgtgtgaatttttaaatagttttcttctaattctgtgaagaatgtcagtggtagtttgacgggaatagcattgaatccacaaattactttgggcagtatggccattttcatgatattgattttttgtattcatgagcatgggatatttgtccatttgtttgtgtcctctctgatttccttgagcagtggtttgtaaatctctttgaagagggttttccctttccttgttggctgtattcctaggcatttactctttgtagcaattgtgaatgggagttcattcatgatttggctctctgcttgtctgttgttggcgtataggaatgcttgtgatttctgcacattgattttgcatcctgagactgctgaagttccttatgagcttaagaagttttggactgagacaatgggattttctaggatctaggatcatgtcatctgtaaagaaagacaatttgacttcttctcttcctatttaaatatgctttatttctttttcttgcctgattgtcctggccagaaattccaataccatgttgaataggagtggtgagagtgggcattgttgttttgtgcatgtgtttaaggggaatgcttttggcttttgcccattcagtatgatattgtctgtgggcttgtcataagtgactcttattattatgaggtatgttccttcaatacctagtttattgagagtttttaacatgaagggatgttgaattttattgaaggcctttcctgtgtctattgagacaatcatgtggtttttgtctttagttctgtttatttaatgaattatgtttattgatttgcatatgttgaaacagcctggcatcctggtgatgaagccaacttgatcgtggtggataaactttttgatatgctggtggattcggcttgccattattttattgaggatttttttttattagtgtccatcagagatattggcctgaagttttctttttttgttgtatctgtgtcaggttttgttatcaggatgatgctggcctcataaaataagttagggaggagttcctccttttcaattatttggaatagcttcagaagaaatggtaccagctcttctttgtacctctggtggaattcagctgtaaatctgtctggtcctgggcttttatttttgttggtaggctatttattatgcctcaattccagaactcgttattcgtctattgagggattcaacttcctggttcaatcttgggaaggtgtatgtgtctaggaatttcttttagatttttttagtttatgtgcatagaggtgtttatagtattctctgatggttgtttgtacttccatggggtcagtggtgatatcccctttatcattttttattgtgtctatttgatttttctctctattattctttattagtctagctggcagtctgtctatattattaatattttcaaaagaccagattctggattcgttgattttttgaagagttttttggtgtctctgtcttcttcagttccagtctgattttggttatttcttgtcttctgctagctttggggtttgtttgttcttggttctgtagttcttccagttgtgatgttacgatgtcgacttgaaatctttctagctttttgatgtgtgcatttagtactataaatttcccacttaacactgctttagctgcatcccagagattctgatacattgtctctttcttctcattggtttcaaagaacttcctgatttctgcattaatttcattatttacccaggagtcatacaggagtaggttgttcaatttccatgtagttgtgtggtttggaatgaatttcttaatcctgagttctaatttgatttcactatggtttgagagactgtttgttatgatttcggttcttttgcatttgctgaggagtgttttacttccaaatatgtgaacaattttagaataagtgccatgtggcaccaagaagaatgtatattccgtttttttgggcggagagttctgtagatatctctcaggtccacttgatccagtgctgagttcaagtcctgaatatctttgtttttttttaattttattattattatactttaagttttagggtacatgtgcacaatgtgcaggtttgttatgtatgtatacatgtgccatgttggtgtgctgcacccattaactcgtcatttagcattaggtatatctcctaatgctatccctcccctctcccccccaccccacaacagtccccggtgtgtgatgttccccttcctgtgtccatgtgttctcattgttcaattcccacctatgaatatctttgttaatttcctgtctcaatgatctgtctaatattgatagtggggtgttaaagtctcccactattattgtgtgagaatctgagtgtctctataggtctctaagaatttgtttcatgaatctgggtgctcttgtgttggcggatgtatatctaggttagttagctcttcttgttgaattgaaccctttaccattatataatgctcttctttgtcttttatgatctttgttggtttaaagtctgttttgtcagtaactaggattgcaacccctgcttttttttctgctgtccatttgcttggtagattttcctccattcctttattttgaatgtatgcgtgtcttcgcacatgagatgggtctcttgcatacaacacactgatgagtcttgactctttatccagcttgtcattctgtgtcttttaattggggcatttagcctatttatatttaaggttaatattgttatgtgtgaatttgatcctgtcatcatgatgctagctggttgttttgcagacttgtttatgtagttgcttcatagtgtcattggtctgtgtactttagtgtgtttttgtagtggctggtaatggtttttcctttccacatccagtgcttccttcaggagctcttgcaaggtagatctggtggtgacaaattccctcagcatttgcttgactgaaaaggattgtatttctccttcgcttatgaagcttagtttggccagatatgaaattctagattggaaattattttctttaagaatgttgaatattggccaccaatctcctctggcttgtagggtgtctgctgagaggtctgctgttactcttacggtcttccctttgaaggtgacctggcctttcactctggctacccttaacattttttccttcatttcgaccttggagaatctgatgattatgtgtcttggggttgatcttctcatggagtatcttacttggtttctctgaatttcctgaatttgaatattggcctgtcttgctggtgacatcctgaagtatgtttctcaacttaggtaattttccccgtctctttcaggcaccccaatcagtcatagcttcagtctcttttacataatctcatagttcttggaggttttgttcattccttttcattctttttttctgtaatattgtctgcctgtcttattttggtaagatggtctttaagttctgagattctttctactgcttggtctatttggctactgatacttgtgggtggattgcaaagttcttgtgttgtgtttttcagctccatcaacctatttatgttcctctctaaactggttattctggttaactggttaacagctcctgtaatgtcttatcatggctcttagcttctttgcattgggttggaacatactccttttgctcagtgaagtttattattacccaccttctgaagtctacctctgtcaagtcatccatctcagcctcagcccagttctgtgccattgctggagaggtgttgtaatcatttggaggagaagagacgctatggatttttgtattttcagcatttgttgttgactttttcgcatcttcatgggtttatctaccttcaatctttgaaaatgctaacctttggttgggggttttgtggggtcttttgctgttgttgttgttattgtcattgttgctttctgattatttttcttttaaaagttaggaccctcttctacagagtggctgtggcttgccgggggtccactccagatccaactcacctgggtccctcctgcacctggaggtgtcaccagtggaggctgcagaacagcaaaggtggctgcctgctccttcctctggcagctccatcccagggcactgacctgatgctggtcagaactgtcctgtatgaactgtccagcaacccctgttggaaggtctcacctagtcaggaggcatgggatcatgggatcaaggatctgcttaaggaagcactctggctgcccattggtggagcaggtgcaccgtgctggggggaatccccctcctctggattgccaggctcttcagagccaacaggcaggaaagaggaagttttctgaactgtggagattgtggccacccctccctctaggggatggacagccacagtttccacagtttatgagcagagttctgtccataaacccctagctggagttgctgaaattcctgcagagaggccccaccaagcgaagaaggatggatccggatcccacctacagaagcagtctggccacgatctgccacagctgctgtgctgcactgtggggagttcctgccagtccaaaccattcagtctccccagcagtgggacgggaaaatggccaactggagccacagcaacggcagccacccctccccctagaaactcagttgttttaatcagtccccaacatgctgccactggccacaatcccagcagccattaagagtgtgcacagttctgtgcttgggacccaaggctctggtggcatgggctcacaagaacatctcctgatcaggagtacagatcagcttgtacagatgcatgaaaaaagcatggtttccctggtggggtagcataatcattcaccatctcccttggcttggggtgggagttccccttaccccttgtgactcctgggtgggctgttgctccactctgcttttcttcactctctgtgagttgtgccaactgcctagtcaataccaatgagaaaacctggatacctcagcagaaggtacagtgttcattcgctgtttccattctcctcagtgggagccacagaccagagctacttctaatcaacattcttggcctctcccttgtttttttattgttgggttttagaatttctttacaaatcctggattttttttaagagacagtgtctttctttcttgcctacttgcctaggctggtcttgaactcctgggtctaagtaatgctcctgccttagcctaccaagtagctgggattacaggtatgaggcaccatgcctgaccatattttggatattgatctcttatgagatatactatttgtcaacatcttctttcattctgttgattaccatgtttactctattggcactgtcctttcgtgcacagaacttttaaagtttttatgtcacatttattaaagagaaagttcaagacatgatatagaagagtaataggaacatgttatgtacatatagttgccattcaactaaattaattgatttctgtaatgtgccatttggggcaaaaacaataacattgtagaacctttccaagagattaactttctattttcaaagaccaacaattccacccaagtaaattactgcaaaggcatcctgactggtctccttgcctctactttacaatgtagacattgctcataaatccaagttaatctctctgaatgttagttccttcaactgcaaaatgagaatatctattccatggagtaatgctggggattaaatgaaatggcaaatataaagcatcaaaaatagtgttgaacacatagtagataataataattatttttaaatattttaaatatatttttatatcaatagtttctggggtacaaatgactttttgttacatggataaattgtatagttgtgaaacctgagattttagtgcacctgtcacccaagtagcataaattgtactcaatatgtagttttttatccttcacccccatcccatcctcccctcttctgagtctccaatgtccattttaccactctgcatgcctttgtgtacccatagcctagctcccacttgtaagtgagaacatacggtatttgtttttcctttcctgagttagaagttttaaattttgatgaagtccaattcatctattttttcttttcttgtctatgtctttggtgttatgtccaggaaatcatagcctaatcaaatgtcatgaagattttcctttatgtttttttctaatggtttggtagttttaagttttacatttaggtttttgattcattttgagttcatattgtctacgatctaaggtaagaatccaatttcattcttttgtatgtggacttcagttttcccagcatcattgttgaaaaggctgtcctttcctcaattaatggcctttgcacccttgttgaaaatcgtttgacagtatatgtcagggtaatttcctggttttgatattgtgctttagttatataagatgtgacaattggggaaaactggatgaagggtatagagaatctttctgtactatcttggtaacttcctctgaatctataatgatttcaaaatacaacattgaaaaataaagtcaaccaaaataatatgtttatttaaaaagaaaaccaattcaataaggtacctaataaaaattatccgaagtgaaatacaaagagaaaagaagagtgggggataaaagcaaaacagagcatccacgagctgtagtaccatatcaaatggtactatatttttgcctgaaaagtgttaaacacttatttatttgtttttaaacaaggtctcactctgttgcccagactagagtgcagtggtgcagtcatggctcactgcagccttgacctcctgggcttaagtgatcctcccacctcatcctctcgagtagctgggactacaggtctgtaccaccacactcagttaatttttgtattttttgtaaagatggtgtctccccatgttacccagactggtctcaaactcctgggctcaagcaatcctccagccctggcctcccaaactgttgggattgccacacttgacctattttttaaatttacttttactatttgtttctctttgtgtttcactctgaataatttttattgatctatttcaaattcattgatgcttcccagggctgtgtcaagtttgctgatgagtttgacaaatgtatttttaatttctgttaatgtatttttattttatttcaattttactctttctcagattttctatctctgccgaaattacctatctaatctagcatgttgtctactttttcataagagattttagtatattaatcatagtttatgaagcaggtttactaattaccaaccccaaaggaggacccccactgtgtggagaatagcaaagatcactactatgccaaccactaggaaaagaagtccagatacttctttccactgcatcctgagctactgtttaggtccaccacacactggttacctattatctgagtctgatgaaatagaacatgcccacacacaagttatgtaaagcaggtttattacttacagatcagtagcaagggacagaagaagcctcagctccattgtgagtcagtcccctaaagctcaagaaagttgtctgggatatacaaagtactgactacaccaattattatatcatgatctaaagtgtaagtcacaagtcaaactcttgatcacttcattcatattacatgttccagattataaccactggaaaacttctctaacagtaattttgcatgaactcatgtgttctaaaactacaaccaagtgtgcatttcttcctgataggcatttaacacactaagtgaccatatgacttaaattgtccatatgatgctgagagttataagattcatagactcttaagtttgggcataccaaccacaatccatcatgcaattaaagcagtacatttgaaaccagacttcagcaggtttaaaaactaggtggttgttctggtttggtgatagatactacaatcccagaagggtttatgctcttgtttatcttctccttgatggagtataattgttttagtgtctactgaattttcatctaatttggtcttgaggtctctctcatgagaacagctataaactagttttgctctgctggagctttagggaatttgggtgtggagtttacaatgtatcttcatgggatgcttctttattctggaagatggtctaatgcctaagtgtctgacctgtaaccaagcgcccctctcacaggaaacttgtttatactggaagacacttttgtggctcttgtctgacctgtgtccgtttattcctgccaaaatttcactctctgggacagctctgtctgggtaagaagttaaatttgaaggtgtcaggtaagatagaaagaagacaattcaacaaaccacatgactcaaaattccaaaattcgtatattaaaacctaaccttgttgtcctcagtgtgatcattttaagagatgattaagtcatgaggacatgagcctcaaagatgtgattaggacccttataaaaggactcaaggttgaagggaatgctcccttgcccctccaccttccaccatgtgattcactttccgccatgtgaagacactgcaagatggcccttactagatgccagtaccttgatcttggactttccagcctccaggactgtgagaaaataaaattctggtctttgtaatttatccagtctgtggtgttttgttatagcaacacaaacagtcaaagacaacatcctagagggcaatgtcttccagccagcaccattcaattattcttttggactgactacatctaggtaatgggtatatatcattatcccattgctacgtcttgttactaaatgggttttgtagtcttgagcaatattaaacatagcatcccatgagtgtttgaatggcaatggttttggaggcaatgtaggtgagaatagcaaatccatatccaaagtgtatactaattccagaaagaataaatcacttcccctccaaggtggaagattttgatacagtcaacctgacaccaactcgctggctgatctcctcaagtaatggggccatatggtgagttcagtgttatcctctactgctggcagggtggaactcagcaatgctattaagaagataatccctgctgactgtagtcctggttgttgagcccatgcatattacttttcccttcattagaggaggactacagttgatagccattattacgagagatgcctcaggaacaaattagaggaaatacaacgatatcttttagtacttttatgcatggtaatgaccatcagtagacactaaaacaatcaatccagcaaggacagggtaaataactgtatagacctttctggaatagttgtctctgtcactcaaacagaaaaacaaactatactaaattcagaggatgaggggaatcaggagcggcttgtgacggagggagatgaatattagttacagccataatgacaacgtagtggacactgttgtaaatttcactaaccgtcttgccttaatcttctagatcacaattggccacttttcctgacctccctatttgaagaaaaattaaagtatgttaattttcacaggaaaaaaaatgagaggcaccatattagagtatggcagcttggatccctgaatcaccagcttgagaagagctactcacaaatcatcagtatcttcctactgttacattagtgagttataaaattctaccgtatttcagccttcatacactttcaagtctagttattgtagcagtctggcctattctaattaatataaaaagaagaaataataattgtagaaaaaattaaacagagaatataacaattttaatggtttctcctgagctagacttacttgaaatggtcctcattttttgttttagtattaccagagatgtaagacagaatctcacgaaaatattcaagctggtggatgaggccaaattaggcaactaggttgtgtgtctggaattcaaaccatattaagtactccctgcccgcctttctcctatcctttagagcagagcctgattctcacatattgtcccataagtctatatcaatcaaatcaatttttattatcctgaaagcacctatggaaatactaccttttttgaagttaaatacgagcactctgctccatgctgttttactgatatttagaactgtacaaacttatattctttacatttgtgggaaattattatattgtagatgagcctaaaatattctgtgaatcaaaacttactataacaagttgtaaagaacagctttagtggaaagtgtgtacatgaaactagcaaccaaacactcaaagcaagaagaataataactaagtgaccacaaaggaaatttttttaatcacatgcctggctcttgcaggtggagaaggttgtcttgccccaaggaagtggttactagaccagagtgtaacccaatacgggatgctgctttaaaaaaaaaaaaaaaaaaaaaagattcacagaagttgtgcttgagttaaaccactaagtactttccttgccagccaatgagaagaagtgaagcagcatcatttgtctctggctgactgagccagtaagtctgttacagaaaaaaaaaaatcacttaaaagagcaataaacatagaaaatatcaaagcgtctactagtcatgtgtgcaatccacagaaaagaatagaagaagtttactgaagaaaagtttgataaataaaagtaccacattcttgaacaagacaatttgtgtcaattttccaaacaaaatacatagactttgtgatgctttaatctaaatatcaataagatagttttgttaacaaaatgtttctaatttttttcaagaataataaatataaaaatagctattgataaaaatgagggggtgttgctctagtagatgcttacaaataattataaagctaaacaattaaaacatgtttctactgccactaaaaaaaaaagtcaactgtggaacaacattgactgcacagaagccgatccaaatttatgttatgattaacgagatcgaaattgtatttatagtagtccccccttattcatgggggatacactgcaagatcccacagtagatgcctgaagccacggattgtaccaaaccctatacgtactatgttttcatacacatacaaacctatgataaagtgtaatttataaattattcacagtcatagataaacaaaaactaataataaaatagaacaattttaacaatatacggtaataaaacttaagtaaatggggtcccctctctttctcaaaatgtcttactgtactatacacccctattttcaaactgtgattaaccacagataactgaaactatggaaagtgaaaccatggataaggtggggctaccgtattttatttctagaagttactaaacttttgagaaaattttgggatgggacataaacatatttcgaagaagcttccagtgttatagtttatattcttcatttctttgaggcacagaagaacccatttcactcttttggagtcaatccaggtttgtggggtaaaggactgtagctgatgaggattggaagtccgtgagatataaggggttaggaggcaagtttttgcaatatacttgaacaacatggcacctatgtggaatggaagagaaagcagcgtagtggtgaggaaattctggtgggtgaagacattctcaggtgaaatttttagaagaaaaagttattttaagagaattttaaatcattttccttggtattagaaacacaattctaattcaatgtttttcaagagattgcaataatggtttggagtgttttaaatggtgcactgggaagtttactcttgcttgttaaagaatgccacattaggactgctttcaagaacagaacaagttatcctgaatttatgttggataaatttttaaaaatgtagtacataataaaagtggactttttattcagtggaatgagggaaatttactaaaaatgatgttgggtctattggttatttagtaggaaaataaaaagagctcatacatacacacatacagagatgatattgagttagattaaaagtttaaatgtaaatcaagaaggaactcaaaatacagaaaaagatacatgttaatatttattttattaaaaagtgttggaatgatttaaataaaacaaaagaaagaaaccatatagaaaaatattgttagactatatttttaaatcatcataaatacaaccacaacttaaatgaaaaatcaagagttaatatgtgaaatgtatatcaatttttaagcattgcgctatattaaaagaaagtgcttatagtgcagtacgtgaaccttaaatgagcaaaatatattgtattagttttctagccactgtcacagaaaattagtacaaatgcagaagcttagaacaaaacccatttattacatcagctttctaagtcagaagtctaggcagagctcacctgggctttctgcttaggatgtcacaagactcaagtcacagagacattgtaattctcatctgagtttggggtcctcttccaagctcactgcctgttggcagaattcatttccacgtatgactgaggtccatagcaactataaatataggtgcatctaataaaatatcctcaaagacatgaatcaaaattgatataatatttaggtagaaagcaataaatctaccatttatggtatgatattttaatatatgtttctaggttctttataagtcaagaaggcaaaagtaggatataaaagatctaaacaacacaattagtaagcttaacctaatagactcaaatatattataaagttattgtctatgttctcatctatgtgccaggtggtagattcaccagtgcctattcaccagtgcctattatattaattacattacattacattaaaaaacattaaaaataataaactggctgggcgcggtggctcacaactgtaatcccagcactttgggaggcaaggcaggtgaatcacctgaagtcaggagtttgagaccagcctggccaacatggtgaaaccctgtctctactaaaaaaatacaaaattaccagggtatggtggtatgcaccttagtcccagctactcaggagactgaggcaggagaatcgcttgaacctgagaggtggaggttgcagtgagctgagatcgcaccactgcatttcagcctgggctattaagcaagactctgtttcaaaaaaaattaaaattaaaattaaaattaatgtaataggtgctggtgaatctaccagttcacatagatgagaacatagacaataactttataatatattcaagtctattaggtcaagcttactaattgtgttgtttagatcttttatatcctacttttgccttcttgacttataaagaaccagaaacatatattaaaatatcatactataaatggtagatttattgctttctacctaaatagtatatcaattttgattcatgtctttgaggatattttattagatgcacctatatttatagttgctatgttttccttttcttttctttctttttttagacaaagtctggctctatcgcccaggctggagtgcagtggtgcaatctcggctcactgcaacctacacctcctggactcaagccatcctcccacctctgccttccaagtagctgggattacagacacgcgccaccatgcccagctaatttttgttttttgcagagacaggttttagccatgttgcctagactggtcttgaaatcataagctcaagcggtccacctgcctcagcctcccaaagtgctgggattacaggtgtgagcccctgtgcccagcctttgttttccttgactaggtgaatgtttatcattatatcagtctttctgtcctacgatatctttttccttaaaatttgtttttgacattaataaataaacaccatttcttagaattagtttttgcataatatgtcctttctatgttttacacttaatctctgaaatgacttttatgctttaggtatgtgtcttgtaaacagtataacctgaatttatgtttttgcattcaatttgtcagtctctgtcttctggtcacaagtttagtctatttgcagttactaaaattaatgagatgtgtggactttatattataatatttttcactttaatctttcccatgattttactgacttttttatcctgttgtcacatgtctagaacccattctaacgtgtatcaggcctgggtatgctgcctggaaggtggatgtattttgcctcctactttgggatgcgttttcagtctctgttaaggttttggttgctcatttctggcatccccttcacacaggaaatacccagattcagccatttgcagattttgaaacattgttctggttcgctgcatatggcctgtctctggactcaactcaacatcccatgtcctcgctcagactatataactctagacccagcctgttaatatggactgcttgtattttttcagagaaacctctaaaagaaattatcaatttcttcaaaacattaacttgataggttctttttaaatcaagtaatctgttgaaaaaaaaattatatgggtgctctaaactatatcccctggataatctaacctgtaaatagtttgaacagttatcttttacagccagaataacaatactagttaataccagaggactaatctatgggtagctcgtttcaaaatttactctgagagcttaaaagaaaatatattttgtagggaaacaaagcatatttttccaagatccagtcagtagtgaaggcatcttaatagtatccaggatcctcacatgtgaagaaaagtgaactaggtaacaaatgagaagacttacatacgcttagttcttgcaggaggaaaggaactatctgggtatggaaaaggttactaggcaagattgtgattgaagagaaaggataatgataaaggggctttgcagaagctctggttagaagaaataactaatagtaatgaatatgtatctctccaaccaatgagaagcatatgatgaggcagagtcacttgtctctggcagtccaagctactaagaagcacaaataaaatatatagtagcagggggagatgggaagggtgagagaatgtaggataaattaccattcaaactgccggtagaaatataaaattgtaaggaataaattccacaaaaaaatacagtgttttaattacaaaaatttaccatgcagcataaagacataaatgatttaagaaacatgacatgttcagagatgggagtgtaattttgggcttgtattttcaaacaaaattcatatgacaatgagaattcaaacagtttagattattaaaattaaatttaatgaagttggtagctatattctggttatgtacaagaatgtatccttttcttaggaaatacacactgaagtacttaaggataaagagttctgatgagtgcaatttcagaaaaaaaaatatataagtacaaaatactattcttattgcaagttttctttaagtttacttttttatttttttttttgagcagaatagttgtccaggtgcagtggctgacttatttatttatttattatttttttaatatatatgttttattatactttaagttctagggtacatgtacacaacgtgcaggtttgttacatatgtatacatgtgccatgttggtgtgctgcacccattaactcatcatttacattaagtatatctcctaatgctatccctccctcctcccccctccccacaacaggcccccatgtgtgtgatgttccccttcctgtgtccaagtgttctcattgttcttttttacaaactaaaatgaaaaaatctacatgaggctataaaaatattacctctataaaataaaaacaaaatggaatgtaaaaagagactggacacaccataatgtgaagattctccttttttgtgtactcatatatccaaaaaggaaactttccattttgtagttgggaagtagagccaagatgtaggagtaggaggggagttgagaaccaacaattcagtaaaaatgctttcagtcaattcccatctgtactcaaaaaaaaaaaaaatttttttttttgagacaaagtcttgcttttgtcccccaggctggagtgcaatggctcgatctcggctcactgcaacctccgcctcttgggttcaagcgattctccttcctcagcctcccgagtagctaggattacaggcacctgccaccatgcttggctaatttttgtatttttagtagagacggggtttcaccatgtggccaggctggtctcgaactcctgacctcaggtgatctgccctcctcggcctcccaaagtgctgggattacaggtgtgagccactgcacctggcctcaaaatttaaataattaggtaacaaactatgacacaattatatacagtccttcaaaacaatgtcttagaaagatatttaatgacaaaatagagttgtttgccatatgttaaatttaaaaggagttacaaattagcacattcactgtgatctaaaacctctaaatctgtttatgtttttatttatatctacatttatagctttgaagccctcccaatatcaactgtcacccaaggttctaaaatacaataaaagtgatcttgttttcttctgttcttggttataattctaagacggtctgacaagtctattgtgattgactttaaaaatacagatgttaaatgaaatctgtatgtggaactattggtctcaatgatatatgcaactctggaagttgggtactcagctttatctaatctctccctttgctcacctccaccaggcttgcaacgccctctacagtccaggcaacaggtacatggttttcaatcccatttgaactgcttctgggtctccctatgttgcctaggctggtttcatactcctgagctcaagcaatcctcccaccttggcctctcaaattgctcaagcatcttctctgaacccagttgaataaaactggaaattaataagaagagaaatttgggaaactataaaaatacatggaaattaaacaatatgctcctgaatgaccagtgggtcaatgaagaaattaagagggaaattgaaacatttattgaaacaaatgacaatgaaaacacaacataccaaaacccatgggatacagcaaaagcagtaataaggaggaagtttatagctataagtgcctacatcagaaaaggagaaactttaaattagcaatctaatgatgcatcttaaaaactagaaaagcaagaggaaaccaaagcaaaaattagttgaagaaaagaaaaagtaaagatcagagtggaaataaatgaaattgaaaaaaatacaaaagatctatgaaacaaaaatttgcttttgtgaaaagttaaacaaaattgacaaacctttagcaagacaaactaagaaaaaaagagagaagatccagataaataaaatcataaatggaaaaggagacattacaactgatactgcagaaattcaaaggatcattagtggctactatgagcaactatatgctataaattggaaaacctagaagaaatggacaaagtcctagacacatgcaacctaccaagattaaaacaggaaataactccaaacctaaaaagatcaataacaagtaacaagatcaaagtcacaataaacagtctaccagtaaataaattccaggacctgatgacttcactgctgaatgctaccaaacattcaaagaagaactaataccaatcctactcaaattattccaaaaaatagagaaggagggaatacttctacaagtattttatgagggaatacttctaaactcattctatgagcccagtattaccttgataccaaaaccagacaaagacacataaaaaaaacctgtaggccaatatctctgatgaatattgatgcaaaaatcctcaacaaaatattagtaaactgaattaaacaatacatcagaaagatcactcataacaatcaagtgggatttatcgctgggatgcaaggatggttcaacatacacaaattaacgtgatacatcacatcaacacaatgaagataaaaataaaatgttcattttaattgatgctgaaaaaagcatttgataaaatttaacatcatttcatgttaaaaattctcaaaaactggggatataaagaacatacttcaacataataaaagccatatatgacagacccacagctagtatcatactgaatggggaaaaactgaagtcttttttctaagatctggaacatgacaaggatgccactgtcaccactgttattcaacatagtactggaagtcctagctagagcaattagacaagagaaagatataaatggcatccaaatttaaaaggaagaagtcaaattatccttgtttgcagaggatatgctcctatatttataaaaacttaaagactccacaagaatactattagaactgataaattcaataaagttccaggatagaaaatcagcacataaaatcagtagaatttctatatgccaatagtgaacaatgtgaaaaagaaatttaaaaagtaattctatttaaaatagccacacacaaaatgaaatacctaggaattaacttgaccaaggaagtgaaaaatctctataataaaagaaattgaggaataagaaatctctataataaaagaattttttataataaattctgtattctattataattctataataaaggaaattgagaataagaaatctctataatacaagaaatttttttataataaaaaaaggaaacatgttccatgttcatggcttggaagaatcaatagtgttaaaatgtccatactacccaaagcaatctacagattcaacacaatcactatcaaacaaccaatgacatttctcacagaaatggaaaaaaatcttaaaattatatggaaccacaagactcagaatagctaaagccatcctaagcaaaaagaataaaactagaagaatcacattactgacttcaaattatgctacagagctatggtaaccaaaacagcatggtactggcataaaaacagacgtatagaccagtggaatggactagagaacccagaagcaaatccacaagcctacagtgcactcattttggacaaaagtgccaaaaacatacactggggaaaagacagtctctgcaaaaagtgatgctgggaaaactggatattcatatgcagaagaataaaactagactcgtttctctcatcatatacaaaaatcaaatcaaaatggattaaggacttaaatctaagacctcaaaccatgaaactactacacgaaaacattagggaaaatctccaggacattggtctaggcaaaaatttcctgagtgatactctacaaacacaagcaaccaaagcaccaatggagaaatgggattacatcaagttaaaaagcttctgaacacaaaggatacaatcaacaaagtgaagagacaacccacagaatggaagaaaatatctccaaactacccatctgatgagggatgaataaccagaatatataaggattcaaacaactctataggaaaaaactaataatccaatcaaaagttgggcaaaagatttgaatagatgtttctcaaaataagacatacaaatgacaaacaggcatatgaaaaggtgctcaacatcattgatcatcagagaaatgcaaatcaaaactacaatgaggtatcatctcactccagttaaaaatggctgatatcgaaaagacaggcaatagcaaatgctgggaaggatgtgaaataaagaacacttggacactattggtgggaacgtaaattagtacaactactatggagaacaatttggaggttcttcaaaaaactaaaaattgagctctcatatgatccagcaatcccactgctgggtatacactgaaaagaaaaaaaaagtcagtatatcaaagtatccatcaacagttgaatggataaagaaaatgtggtacatatatataatggagtactattcagccataaaaaagaatgagatccagtcatttgcaacaacaggcatggcagttccataagtgaaataagctaggcacagaaagacaaatatcgcatgttcttagttatttgtaggatctaacaattaaaatgattggatttatgaacatagagagtagaaggatgattaccagaggttggaaaggtactgggggatcagggagggagggatatggggatggttaatgggaaaaaattggaaagaatgaacaagatctactatttgatagcacaacagggtgactatagtaaatagtaactatacatttaaaataacttcaagagtgtaactggattgtttgcaactcaatggataaatgcttgagggtatggatgcccattcttcatgatttactgatttcacattgcatcctttttttcaaaacatctcatgtacctgatacatatatacacttactatgtgcccacaaatattagtaataaacacaatttaaacaaattagagcccacacatcccatatacatacttcccatattaaagcccaaacatctcatataaacactttattatttgaaattcttggccatggaatatcgtatactttcatttaatttcttcaccaactctatccaaaaacaaaaaaaacccttcaatccccatatgcacagatctttgttagtcacatctgctcatggactcaacaaacagtaattgagtccactgactgcatttcggaaatccacactcatgatcttcctctgtatgttaaataaatcagagccatcgtgagagcatgtcatcatggggaacacaagtgcctgagttagattgatcaaaaagataaaatttgttatcataacaaagggctaactcacagaagccaaagaagatatgtaaaaggattgatctaaggatagtacactgtgtgttatacaagaaatcctctgtatatttcttatctctaattttctctgcctgtcatcttcattattttatatatctctgctttcagattcacatagtaccaaatggtccctgccaagatgttctcaattcatctctcctttgccctagggcttcttttcctagaccagtcagttgcttactgtacaccactaaagtgttgccaggggatgagttcacattacagtacatgaacatagttactcctgatgtgagcttatggaggggatgagggagtggtgcaggtgatacacaaaggatctgctggtctgcacatcagactcaatattctctactacaaggagacaggatataagcccagtccatctgcttcgttctttgacagtacatttcattccaaataagtacaagtgcaaaaatctgtggtagtaaatctgctgcacttttcttatgtctgacactaataacccaagagagactataataaaatatttctgattttgaaattagcctgccactgtttgcatggaaatttactactggtaagcccttgtttctcagctttcttcatttgtatcttcatagcaagaatcaccacctaatactgcatatctgtatattatgtgattattttttctttcctgctagaattaaaactcataaaggtagggacatttttaccttgctgactattttatctggaatagtacatagcacttagtaggagctaaataattatttgacaaatgaatggatacattaattgatgaattttatgtccaaatctaggctgcttttgtttacataaacctctgttttccactagtcacattctctgcctgctacatggagagaaccattattcaggatttcagttctgctctaaacacttggatcctttcgcaatcagggatcttcaatttctccacttggtgttttgctcaacaaatgaaagtgcctttgaatattcacatttggtcctccaaaaccacatcagcttttagaacaatgtttctagacaatttattagtaacccttcaaaggtgtgctccccaatttttatgaatgtgtaattatatttaaactgaaatgacataatgtttctgtgtcaaatattgtagagaaagttgaccatctttgcatacgctatttgccatttgagttcttctgtgaattgccggttcacctactttccaacattgctattaggttatttaactctttcttattgatttgagtagtactttatttcttcccttgtttaatatatgtatttaaagtatctaaatatatttcatgactatgttgtccaacttttgtaatacatatcaacaaatatctacctgttatatccatttttaagaaatacataaaatgtaataacttgtacttttctcacccttctttgcttttctaaacagtatttatgtatttcaactttttaaagtttaaatataatatacttaagtgtaggttgtttttgtttttttaatcctgcttggtattctccgagatttgtaatcggtgattcgttgtctgtcattaattttggcaagttctcacctggcttctacaacatcagactcttgcggcttcctcagcacccagcttttgcagtgtagagcagccagcaacacccagcagcttcgtcaggcatgcacaccccccttagcagttttacagcagagagtgaccaccaccaccccacttccatgaaccttacaggaacagctttcccaacaccctagaggaaggatttctgacaagtcccagagggtggattacagcaaactaccgctggagcagcagttcaacaactacctctctgccattcagtgagccatggaagtgcctccctaacaaggtctgacctcacccttggaaagaaaactggagaaggctccttcttgggtgctctatcttaacctaggtgatgggttaatatcgagtgtcaacttgattgaattgaaagatgcaaagtattgttcctgggtgtgtctgtgagggtgttgccaaaggagattaacatttgagtcagtggactgggagaggcaagacccaccctcaatctgggtgggcaccatctaatcagctgccagcaccactaggataaaagcaggcagaggaccgtagaaggactagactagcggtcttccacccttcatttttctcccttgccaggggctctgagaccttcaaccacagactgaaggctgcactgtcagcttccctacttttgaggtttggggacttggactggcttccttgctcctcagattgcagacggtctactgtgggacttcaccttgtgatcatgtgagtcaacacgctttaataaactcccctttatacatacatctatcatattagttctatccctctagataaccctgactaatacactagggaagtagccattttgtattatattatattatgcactattatatctgccactgctatattatttagagttctctttacttctttctagccaatctcttattactcagatctcttgttaagattcgtatttctttatattgatctttctcattttacattactgtgtgatttcctctctctcctgactagacccatacttataaacccataaaatttcattcaggcacgaatctagaataaaaattattctcagacatgcaaagattagaaaaatttgcttccagaatatccttttttggatattaacagacggtgtgtcgtagcaaaattaggtagtcaaagcaagtaagaggaagatatcagatacctgaaacattatcttctaccaaagaaaacaatgaagagaatcccaagatgacatctgctcagcagtcctggaaatcatttcttttagattgaaactagagaactaagggcaccaggaagtggataaacatgataagtatgatcccataaattttacagtattgttgagatattcaaaacatctgaggatatgattaaaaagtagactacatatatgagggaaaagaaattgcaaatagaaccttcataaaaattaaaagatgcccaacaaaggaaatatattctcaataatgtgcacatacgtgtttaaaaaatacctggttacaaacaaaccataaatactatcgggtttgaaaatattaaagataaattataaatgccagaagttgggatatgaaataaagaaaaaagtagagcaggaaagaatagggttagcagtagcttcatctacaaggagaaaactcaagagatcttgaatataactgacagaataatagagtactgtgtttaaaaatacagggattggccgggcgcggtggctcacgcctgtaatcccagcactttgggaggccaaggcgggcggatcacgaggtcacgagatcgagaccatcctggctaacacggtgaaaccccatctctactaaaaatacaaaaaaaaaaattagccgggcatggtggcgggcgcctgtagtcccagctactcaggaggctgaggcatgagaatggcgtgaacccgggaggcggagcttgcagtgagccagtcgcgccactgcactccagcctgggggacagagcgagactctgtctcaaaaataaataaataaataaataaataaataaataaataaataaataaaaaatgcagggattacctacagaggaactaaacatagtaagataataaaatcacaagaaagatgtcagagacctaatttttggtggtttaaattatctggtttcataacaggaagtcaatggatgtctaaattaatacccccacatacaaaaacatacgcatattactattaaagtcattgaactggggataatgacagtggaggaaaggaatggcatgaagggctcttgttttcattaaaatacatctctattgtttaatcttcaaactatatactgatatcccaataaatttaaaatagtaattgtaaagtaaaatatcattcttactgaaatatcaagaatgctgcagatggtggcggaatgttcaatgtgaaaaaggatagtggcttgcactagaatgacagcagtgaagtttgttttaagcatgtaattttatagtaccaatctcttacctgtgagagcatgtaaaagactgagctcctcagttctcaaacaaaagcagactttaactcctgctccagccatgcttctttgcttctcaaacatccaaaactgcatctcagattgcatcatattctgagcacatggaaggaagagtacgggaaataagagtggctgtgttaccaccctcaaggaatcctgacccctcaaatccagacctgccaaggggcaaggaaaaaagggaaagcggcagctcccttgaatttctaaagtgcaatgtccccacctactggtgaacatgacccagttaacatccctacagctgtccatgtcctcctaaaacaagaaccttgaacttcttccagtagtatagaatccgtgtcctttagcacagttctacaccaaaagataaacaaaatattaatccaaaatttttacaatgcaatgagggtgtgggaatgataattttaaaacatgccacacaaggttagttttaaaataacgccatcgttagcattcccattccctactatctatctactcctcacagcttctgctcagattgtcttctctccattgtctcttccatctccctgtacaaacctcctctcttacactgcctttcctgccaacacactgcttccccatgtgttaagttggcagccttttttccctctcattgttttctggcttctgatatttcagataagaaatttgattccagtctggttctcgtccttttatgtgtaaactgtttatttctttcttggaagccaatagatcatttttattaccattttattttctgattgtgtagtaaaaattttcatccctccagctacagaactatttgtatattttcatgattccacttgattcctttaaattgcatgaatcttatctagccagagactaaagtcttcctttccttcagaaaaaaaaatcttcgattttttattgtatcctatattttttctatttttccggcacacctattatacagcagttggagatggctgtatagatagaactttctcaacatattttcacaattttatgtgttccaaggtagttaaaacaggaatctgatttcttttgtactttctttcccaccctcctattttttttaagactcagaaccactacttgaacactctaattgataactgcttagttatttctcacctgccttaaagagtgtttcttcattatgctcaagaatgagagcaatttaaaatgaaatcattttaacctgtctcctcagagacaagttctgttggcttctttttttcctatgtattatgtgttggtaaaattttccagtttctttgcatgtcttgtaatttttgtttaatattgatattttacataaattctgattccacaatccctaggagtaagtgctcttgctgtttgttgtttgtgttagtgacttgcttgggctagttcttccaagtctgtttccccctagtatgcagcctatggtgtctctgctaagtttgtttaataatttttgttttcattattaagcctgatttcctacaatcacccctggtcatcatagcttaatgtcagcctatgattgatgaaagattctgcttaaacaattgagtcagtaaggcttccacactttgccattgaactgagtgggatgtgggaaatgctttcaaagttccgggactttacaggtatgtcccaatttttactttctgccttcacatgtccttatattcagccaggtctctcctgagcaggcttaaccaagctgatgcagacagctttccacaccactggggataaatgagattttagcaaggctatttttgactatctcattctctggatctccctggtaaaattcctgactggcctgccatcatgacttcaagctagttgagatgttagccttccataattatttgccctgaggtctatgctgttttctacaaaacgccaagacgttattttgagggtgtgtgtgtgtgtgtgtgtgtgcatgcatgtgcgtgagctcttttccaaaaaatgtgtgtgagctccctctggcaggttaagaagagctgtctaatcccatggcctgtcctcccacacaggtagaaattctgcaccataagttgaggtgaaggaagttggtgaaagcatactctggccaaaataatactgattttgctgtttttattaggattcagtttagattctcttaactaaatgcttctcaatgttcgtatcctttggtcaatttccagagtctttaaatgattgtttgtggcaacgttgtccaatgttctcactgctttttagattcgttgaaatgttttgatgtcaatatatgtggtatatttttatgtattttctacgtgaatttgaaaataagctgtatatagcatttggtacatacacacttaggataatatgtctttttgatgtattgactctttttcattatgaaaaatttatctccagtaatattccttatttgtaaagttttctttgtctgatattaatgtagccactccagctttcttgcccagtgtatattttttcatccttatatttttaacctgtgtcttcatacttaaaatgcatttcttatggacagtgtatggtcaaaagtcttgcttatttatccagtttagaaatatgcatttaatgtaattactgaagtactggatttaagtctacccccttgctgctttttgtttttggtccatctgttctttttctcttattcctctttacttgcctttcttagtatatttttctccctcctaatggtaactgagtagaaagatgtcagaacttaggtctttaagatttgtggaactttaaaacaatttttattttattttatttgaggcagagtcttgctctgttgcccaaactggagtgcagtggcgcactatttgtagaacttgagtggaaaatcctaaataagaataccacagaggagagcccaaaattctgcatttgaaagaaatttgcatgcagaataggggcccctctttgagttttcatggtttttggggatttttctcctcaatagcaactaattctttcggcaccaaactccaacctccgtcttctcttcctggtaagactgcatctttctgcttgagctttgttctaccatctactgctttagactgaaaagcactctcaggggaaactcacagtaaacgttgaactcacctagttactttccttttctcaatatttatctcctgatgtattctgcatgcttcaaaagatctccaatgattgcaaatttttaagtcatttttatagatttcataatttttgtttctagaaaggctagacgtagacatatggtttttaatataagtaagtagctatagaaataaatgtatagatgtttatgtgtatgtccacaaataggatcttagacttttgacattcccatagcaatgagcacacttaacacacagatcttgatctagctttttaaccagactcttctaaaagaacccagagctatgacagattctagagcttgagaaaaaaaataaaagatgatcatagaaagtaaggatatttaagaatggtggatacggccaggcgcggtggctcatgcctgtaatcccagcacttggggaggccgaggcaggcggatcacgaggtcaggagatcgacaacatcctggctaacacggtgaaaccccgcctctactaaaaaatacaaaaaaaaaattgccgggcgtggtagcgggcgcctgtagtcccagctacttgggaggctgaggcaggacaatggggtgaaccctgaaggcggagcttgccgtgagccgagatcgcgccactgcactccagcctgggcgacagaagcgagactccttctcaaaaaaaaaaaaaaaaaaaaaaaaaaaaaagaatgatggatacgtgtcaggtgtcagagataagaatatgttcaaagaatggtagatacatgctctttacacagataggcaaaaaataaccagaagaaagaatgcataccacaaatacctaaatcacaataaattcagtttgatcatattaataacaaaaaaaatcttcattaaaaatatgttttaccaggaataaaaataaaacttgagtcataatgatggagaaaccataagaagaacataacttttctaaatatgtatgcatctaataatatgacttaaaaataaatgatacaaaaattgacagaaatgaaaatatagataaatttgcaatcgtaattagagatttttaaatgcttctcccaataattggtaaaagaaatgaacaaaaaatcaggaaaatatattaaacagtggaatagcactaataattaaatcaacctaactgacacttataagacattagactagaatatgcaatggcaaaatacatattatttcaggtgtacatgaaatatccatcaagatgaacaacatactggatcataaatttagtctcaagaaattcaacagtatgcaaactgggtagggtatgttctctgaccaaaaaagataaaaataaaaatacctcaactaaattagaaagcagcaccaaactgataacctggaaatcccctaaatatacagaaattaatcaacatactaccaaataagccataggtctaagaggaaattacaaagaaaattagagaatattttaagtgaatgatcatgaagttcattatatcaaaatgtatgagataaagctgaaagagtgcttgaagggaaattagtttctttaaatgtatacatcagaactgaagagaagtttaaaatcaatggtgtgagcttctaccttaagaaggtagaaaaaggaaagcaaactaaatctaaagaagatagaaggtagaaagaaggaattaaaaagcaaagatgtggaaccaacccaaatgcccatcagtgatagactggataaagaaaatgtggcacatattcaccatggaatactatgcagccataaaaaagaatgagttcatgtccttcgcagggacatggacgaagctggaaaccatcatcctcagcaaactaacacaggaacagaaaatcaaacaccgcatgttctcactcataagtgggagttgaacaatgagagtacatatccaagtctcacatgtctcaacaatgagaacacacaaggaggggaacatcacaaaccggggccagttggggagtggagggaaagagaagggtgagcattggacaaatacctaatgcatgcaggtcttaaaacccagatgatggattgacaggtgcagcaaaccaccatagcgcatgtatacctatgtaacaaacctgcatgttgagcacatgtatcccagaacttaaagtaaaataaataaaaaaaagaaatgattaaatgtggcaaagacaaataaaagaaagaaggaattaataaaaatgaaaccagacaacaatgaaacagaaaaccagcaaacagaaaaattaacaaagctgggctgggtgtggtggctcacacctgtaatcccagcactttgggaggatgaagagggacgatcatttgaagcaattctcctgcttcagccttcccaagtagctgggattataggcatgcgccaccatgcccggctaattttgtatttttagtagagacggggtttctccatgttggtcaggctggtctcgaactcccgacctcaggtgatctgcccaccttggcctcccaaagtgctgggattacagggatgagccaccatgatgggcctaaaatgaaattttaattggcaagaaggcagatggtgagaattgttgatccaataataacatgaagtccatgaaagcctgtggctacaaagaatgttgagccatagattccatcagagataataaaggggcctcgaaatattctgagacttgtagaagagtgaaatagactcctaagaggatcgtggtaagtactgcttgaattatttgtttttggttaccttctattaggctgtgatgggctcaagtaattgaaactcctgatgcaagtaatacagacgtatttaggagagatacttctaaagggttcaggggaagaatacctgttgggggtcaatgtcctcctaattctggggtcggtgctaaactggagtgatagaatgcccagaaaaaaaccagcgaagaagaatacttctgaggtaataaataggagcatcccgtattggaggtcttttaggacaattgttgtgtggtggccttggaatatactttctcggacaatatcacgtcatcactgatgtatagtcagtgtgttggttagtaggcctaaagttaaaagagtggtagaattaaagtgaaatcatatggccaggccagatgttattaggagagccgagagagctcctgttagtggtcaagggctaggtacagctatatggtaggcaagtgtttggtgggtcattatgtattatcatgcaaataaagacttactaatagtgtgaagacataagcttgaataagagcaacagcaaactcgagaatagttagtagaattagaataataagagatactgaagttgcggagacactaataattgataatattagcactgcactgcgactgtggtcggcgattatcccacttccagggccaatcaggctaacaaattatttcaaacctattacaactccctacaatgcttcaagccccaaggccccggcattggagggcctataactaaacacaccccccttttacaataagcctcactttgcttttcagcttctgaaggaaatttccctgtaggatccttcacacctaaccaatgcaactgcactatcattattaaacacccctctaaccatcagactaaccaagctgattaccaagttatcacctgaagcaaatggaacgtttctgcatctggcttgttttacagcctatcccttaaccaatgcctctgaactaacttgtgctgtccctggttcctacctttttccatggctcaatatcaatgatgcaacatccgatcacagtaaacgtgtaaaaaacaactcttgctatatctctactatagtggatgtctccctggcctcctccttgtccatctggagtaaggaactgcaggaaagaaacaacatccaatctttgacacacttattctctttccatatctctgcctgtatttacgatgaaggcttgttctttttgtgtggcaccaacacatatctttgtctccccaccaaccggaccggaacctgttctctagtttatctttctccttccattggactagctcctcctaatcaacctttgtctatcccatccatccaatatgttaggaaaaggagagccatccacatcattccttaatggctgccttgggtataacctctggacttagagagggagcaggtggattagccacatactttaaggttctttcgacagaactacagggatctctagaagatatagcctgaagccttgtaagagtccaagaccaactagactccttagctggtgcagtcctccagaacagacagagactagatcttataatggttgaaagagagggcatctgcctctaactgggtgaggaaagttgtttctatctcaaccagtcgggcgtagtaagagatgctgccgtaaaacttaaagaaagggctgaaaagctaagggaataccaacacaaccaaatagattcttagtttgggaacaaaatcatagcatgagtcaccccattcctgggccctctcctaatgatatgcctaggactaactttcttaccctgcctaattaatcttttccaaagatttttaaccaacaggatcatggccatttcacagacaactacccaaaaacatctacagacggcattactcctacagtcaatctgagaccagaaaactctccacacccccctcagcaggaattagccagaaagaacacaccatcctcatccttttataactataggatctggattgacagagcaggagcatcgccattttggacatgcaccaccattttaaagttccccttgatcaaaagccacctaaatccaacccaaagggcatcagcctaatggctaatggcagcatgaccttaaaccacaaatgatacctctgaccagaaacattccaaccctgagataaacccctctccaaccagagacataccagccccaagataacctcccctctgaccggagagatgccaaacccaagataacctcccctccaaccagagacattccaaccccacaataaacttcttctccacacagaaacattcaagcctttcgccccaaacccttaaatactcttagtctgtaagagagagggctcctgactgaaatcagccagaagccctctcaggtttattctccaaaataaacctgtctttgactgttgagccactttttgtgtttctttcctctttctttaactctttttttttttatgcatttatgttttatatacactttatacatatagcgcctgaaggtaatttttttttttaggttgtttttttttttttattttttttatttttttttaattacactctaagttttagggtacatgtgcacattgtgcaggttagttacatatgtatacatgtgccatgctggtgcgctgcacccactaatgtgtcatctagcattaggtatatctcccaatgctatccctcccccctcccccgaccccaccacagtccccagagtgtgatattccccttcctgtgtccatgtgatctcattgttcaattcccacctatgagtgagaatacacggtgtttggttttttgttcttgcgatagtttactgagaatgatggtttccaatttcatccaggtccctacaaaggatatgaactcatcattttttatggctgcataacactgtgtgtatcactatttggattaacataaatgagaaaggagagatagagaccgtgaactaggtaaatggatgtgcatcatttggtggtagtaaaaacacaatctaaatttactccgtgctcaagctcataaattatgattattgacaacattacaatttaggctgtttttattttgtggaactttgtagattaactaagatttcattaatatagtattttatatttacatgcaatgtaatcctttagtaaccacaaagtaggttgttgagaggacccatgatgtaatacatataaaacacttagacctattttatggcatacataggcctcaaataatgttatctaagggtatgacttatataatctgtacttgggactccagtttcaatgcccaaactctgggaaccaagtgtggcttacactgaacatcatttttgcttaaacttgttagtcttatacatctttacaccaattctaagcattaagcttttcctttattttctttctttcttttccttctttctttctctctctctctctttctttctttctctctctctctttctttctttctctttctttctttcttccttccttccttccttccttccttccttccttccttctctccttaattgtgggaaaatataaataaactaaaactcatcattttcacctttttaagtgtacagttcagtggcattaaatatattcacactattgtacacaataaccaccacagatctccagaacttttcctcatcccaaactggaactctgtaaccataaacaactccttattccttcctcctcccagccactagtgaccaccattctactttctgtctctgtttgatcactcaaggtggtctcataaggtagaatcatacaatatctgccttttttgtgactggcttatttcacttcacataatgtctttacatttcatctgagttatagcatattttcagaatttccttcctttttaagactgaataatattccattgtatgtttataccacattttgcttttccaggcatccattgatggagatttgtttgtttgtttgtttcaccttttggctaccattaacgtttgtgctatgaacatgggtatactaatgtatgttcaagtctctcctttcagtttttttgggtatatgaccagaagtggaatcatggcatcatatggtaattgtatgtttaaagtttttgagttatgactctacctttttccacaacagctgcatcattttacattcccgccagcaaggcacaagggttccaatttctccacatccacagcaacacttatattctcttttttccttttgaataatagccatcctaacgtgtgtatgcacaactacacataaaaaaagtggtgaatctcgtaaaagcaatatttatcaaaggaaagaaacaaatccaatacattattttatttatataaaatttaagaccatacacacatttttaaaaagtaaataattagcacaaaatcagagtaatgttttcctccaagggaaagatggtaggtagaaggtgcacacacagggcttctgggaagctggataagctttttagtctgtgtcattaattatttattaaactctatatacatgtttatgcaactctgtgcttaagttatgtgtcagtctaaaagaaacgctactattaaatcctcaattatgaaaatcttactcttcaatcatgagctgaagaatagcaatacaagttgttgattgctcttctggatagaaatccaggataagaaatacaaattgaatttactctgagaaatttatctttcaagacatatgaggtatttaaatttaagagaggtgaagatcatttttactaatataaatttaagatccaattcccttcaaagatgtggactttagggaaaaaattaattgttgttaagaattatggtgattctgctccatagcaacttcattaaaggacctagtctaagttcaagattaaaaggttatatgaggcatatgtgtatgagcaggatagagaaaaatagcaaaaatatcttcttttgaaccatgggactctttgtgaagaagttttatggtggcaaagcctcaacaagaacatcaccagtgatgttttgtggcaagttatatatatcaaagttagtaaagattggaaattgaatgtggtaggcctcttgtgtatgacacaaagcaagacaatgaggaagaagtaggtatttcatggaaaaacaaaataccctgagaagaaaataaagagagaggggaagtgaatcattggtatagtgagttacagaaagtggcaaaatagagaattaaaaataataaataaggcttttgtatcctgcagctcagaaggatatgtttggtccagatttcacccctgcagataagcattgaaaaaggcatgaatgtgaaagtgtggttttgagtagcttaatcaaaattgttttctcttgaattttacattgactaaaacaaatctggatctaagcaaattgttttatattgtgttgtgaaattgtcaaagataaaaactcgtacacttgtatagagcccttatcatgaatggagcttgcaggactggaagttgctctgggtgaatcagcgagtgagtggtgagtgaatgaaggtctaggtctttattgtacaccattaagtatttcgtaaacactgtacacagcctacactaaattacagaaaaaaagtctttcttcaatgatgaattaaccttagtttatgtaccctttttactttataaactttctgaattattataaactttttgactcatgtaataacacttagcttaaaacacaaacacacttagagttatacaaatgtattttctttctctatatctttattgtttaaacttttttctaaaccttttactttttatacttttttttttctaaacagttaaggttcaaacacacacgttagctcaggcctacacagggtcaggatcatcaatatcattgtcttgcactttcccattttgtcccattggaaggcctttaggggcaataacacaaacacacatggagctgtcacttcctatgataacaatgttttcttcaggaatacctccttaaggatctacctgaggctgttttatggttaattttctttttataaggaagagtacactctaaaataacaataaaatgcacttagctggtgcagtcctccgaaacaaagactagatcttataatggttgacaaaagagggcgtctatatagtgtatagtatagtatatacatataccagtaccgtagtcatttgttgtcattattgagtattgtgtactgtacataattgtattgctatacttttatgtgactggcagcacaggagatttgtttgcgccagcatcaccacaaacttgtgagtaatgcattatgctacaatgttacaatggctattatatagggataggaaattttcagctccattataatctcgtgatgaccaacttatatatgttccttccttgactgaactgtcgttatgtggtgcatgattgtattacactgtgagctctgggtcccattaaaattctaggagaaggttgaattttttgttttagcaagaactaatctcatcaagtttagaatgcaagctgtatctcgctttctgtgcgccgtagttctaacgtcattatagttttcaaagactttgccatgctgttcgtgcctgccctgtgcctgggcctctcagccactagtctggcactaggactgtgatatttgtatcatagttcagctcctaatggctttgatatgctggtgtgaaactgtccccctcgtgcggcttggggagcccaagaccctgagagttatgatggttcatgtatagaattagggatccctttctctcactctctcctctgagatttttcccacactctccaggtcccataggtccctcttaccggttcctctggccagaaaggttggtttctctcaaagtattgtcatgtgattctgcacaactggggcttcccttgaggcaaagtgggaagagaaaattgagcaaaaatataaagggaaataccccatattccttaggccacagggttccttttccctagttcttttgggatgtttctttcagagtttttgatggttccaccacagcagccttagtacagcttcctgattctgaccacactcagggaagaactagaagtgaaaaaagaagtaaagttccaaaaaaggaatattgctccacacactctctggagaccccctttgcaatctgtacagaaagaggaggtgtctcttggagtttcttctctctgctctcactgcacactacatgtctggagttaccttcaagtcaaagccaggagacaaaagaggaaaaaccctaggaactcactcccttactattatttctccaagttctgacttccctccctaatattcatgctattttgtacttttcaaggtccacagatagctgccttttatattctgcctgatgtttcccattataattagtgtaagatacagactatagtgggcttattccaacttggccgtcacagaaagatcctcttcagctttgttgttgaaggatgtttttctgattttagaattctaggtttgtgttaggggtagaagttttcttagcgtattttaaggtttcattccattttcctccagattccaaagtttctattgaaagtcagccttaaccttttttgttctttttttccaaagacaagacactttcgtctctggctgatttaaacattttctctttatctttggttttgagcaatttattattttttttttacatatggttttatttcactagtctatgattgaggttgataagtttcttgtatctgtgttttgacatcgttaatcagttttggaaaattttctgccattatctttttgttttctctgctgcactctttatcctttatttttatgtacaattgtaagtatatttgaccattagataatgcctacatgtctctgatgctgatatctttcttcttcattttatcttgtgctatgcttcagagtagatgctttctattaaactgtcttcaagttaactattactgcatttgcctgtgaccagtctgctgttaaattcacccattaagttttaattttagatgatgtactctgatttcttttatttagattccgtatctaaaagattccacattcatattcttttttagattgtaaatctttttctttactatatattccttgatatttatgactatatggttaaatagagttaatttaaagctcttttgtgctaagtgattaagtctagaaagagctttgtgtctcccaaaaaattgttggtgaggctgttggcattcagagtatcatgggatcaaatatataaaaagctcacaacgttttttattcagctgtattggtaaaactgccaccagtctggactgaaagagactgaggttgtttaaaatgtaaaagggcaatggatctgcaactctctatgtaaaagaaacaggctgagaaagttgttcaaagtgccgatcatcctatgtgctctttaaaggtggccaaggagggaaacagaaaaggaagtacttttcaaagggaagagcacagaattctgaggacaggtagactaatgagaaactcccaaggaaaggagtcaggggctaatcaaggaatattgtccacccctagaggggatgtgcaaggcagcatttgttcagtggaatttcagaattgccagggatcagtgactgttcagtcccccattctttccgtttttgaatgggcatgtttactatcattatcctgacccagtttcagcactgtgtattgagtgctgatggaaagacaactttgtttctattgttgtggcttgtatgtcttagaattaacgaaagaggaggccgggcgcagtggctcaggcctgtaattccagcactttgggaggctgaggcaggtggatcatgaggtcaggagatggagaccatcctggctaacacggtgaaaccgtgtgtctctactaaaaatacaaaaaataagccaggtatggtggcacacgcctgtaatcccagctattcaggaggctgaggcaggagaatcacttgaacccagaaggcagaggttgtggtgagccgaggtggcgccactgcactcagtcgacagagtgagactccatctcaaaacaaacaaaaaaaaaaaaaaagaaagaaaaagaaagaaagaaagaaagaaaaagaaagaaagagaaagaaagaggaaagaaacacatgaaaaggtggctcaccagtcacggcacacttattttagagaaaacaaacctgagaggcgccttctggccgagttaggtcagaggcacgctctcttatagactaagttttttaaggattcagagtgggagagtttatccaaggcttggactgcttctgtgtctctttgttgtgcttatctaggagggagagttgtgtgtctgttcccatacatcttttttgcagctgcaggcatatccccagagtctgcttttagcttccctatcttagtgcacctgaagggaaaggaatgtgcttattaaggcccactgttttagggcccattgtatgagggtgaagtttggcagttacccaggggaccttccccccacctttctctgtgcccaaactctcttatctgtgttttactgtctgctctttctggctatttgtagttagaagagaagtgatttccttgaaatgcatgaggctagaaagggagctggaatttaaagtggcggtgtttgtccgagatgacagggctccagctctatcagtatgtttctggattaaggagaactgcattctgacctgcatcctgattgtgagattttgaacttgatggctgatgccatgattgcatgagacttctggtgatcccagattaggggtaagcatatttttcatattggaagaatatgaaaaattgtagcaataaaagtggactgtaatagattatgatgatgatcctaattcatcatccctccctatatccacgccctttgcaatctaactttactatgctctcccattatggatgggtgacttgaattgcctctcaacattaggcctaaccatgtgttcctctacagccaaggagttattagcaaatgtcacacactctgggccttgaaattggcgtatgtattggagctaacattttgcttgcttctgcattgccataaggacatttctaggcaagtccaccggccctaagaagaggatgagaggcatgtgaagaagagtccaccttggatacataagtgagcttggccaaggttagcagtgccacctagctgacccagacatataagcatattgttatctgccactggtgatttgtgttgtttgtaatgcagcattgttgtgacaacagatgactaatatactaactaatgtaccttttaaaatgttgtctatgatctgttcctagaccactaaaatatacgtcccatgaggacaggaataattttttctgccttatttctgttgtatctttagtacctccaacactttctggcacaaagcagttttctcaaatatatatacacacacacatatatatatgtatatatatatatttaaacagagtctcattctgctgcccaggctggagtgcagtggtgcaatctcatttcactgcaacctctgcctcccaggttcaagtgattctcctgcctcagcctcccaagtagctgggattacaagcatgcaccacaacacctggctaatttttgtatttttagtagagtcagggtttcaccatgttggccaggctggtctcgaactcctgacctcaggtgatctgcccgcctcagcctcccaaagtgctgggattataggtgtgagccaccatgcccagccaaaaatatttttaataaataatgaatttcaaattttaaaaaccttcttatgaaaagacctcttggagagtttaatgtacatacatattccagagtttggacaattcagtagattggtacctggggtatgctgaagaatgctgaagtccaagagtcaacttagctacatgtttttgaaacagaaaaaattcccttgttccccttgcagggagtgcgatgtggctctcttctccagtgcccgctgctcagacctccaggggagcatacagatggtcaggctgtgaggctctgatcccagagcagtgtctgggggtgaatgtttacagctcctgaagccccagtgggtgtgttcctctgctgatgtgctctctctcaacgtccagcagcttctgtccctgccttgctagggtctcaggtttttataggcacaggatgggacatggcaggccagagtggtcttgggaaatgcaacatttggacagggaatgcctgttctcacctaggtccgtggggatggagccctagccagggaccataccctcctctacccagcacttctgctccctgcttccctatcatttaaagggaccacactcttgccttcctagcactcacgtaccattttcaagcagagaaaagaacaagtagctacactaggatttgcctgacttccagaaggaaagagattcatctttccttggcaatcgacatagaccaaaagtaagggaaaggtctggggtctgcttgtcttagtatctcaaggcagcctccaagagaaacagatcatagaagaaagaggctgctagtattccagagtgcctagtgactgagaattccatgagaatggagatgcagtagccctcaccgggctctgaactaggggagtgtggattctcaaagaattcatgaaaatgttcacaatagagtcttcttatgcatctgttttccctacagcattcaattcaagcacatgaaatatcaggcaagtaaaaactgtcctcttctgctcttcatgcctcaactcgcaggggtctgaaactatatcacgtagaagaattagaagcacaagctgtagaaacaaaagaagctaattttgcaccttcactgtttgtgagcttctcatctgcaacactcttgaataagcaagagtgtgaggcctccgttttgaataaaatatagaaatttgactattgaatgggactaattgaatacctttctttttttacttaaacattatcagagaggttatgaagccttcctgaatgctcattcaaggtaaggaattggctaaccccaaagaacacattgaaaagaaaaaatggtaataggattaaattaaatacgttttattacattgcatcagtttagatgttcaatatatgcttttttaataaagaaaagtttatttggctaatgattttcaggttgtacaagaagcatggcaccagcatctgcatctgatgaggacctcagggtgcttccacttgtggcagaagaaggggagctagcatgtgcagatgccacatggcgagagataaaggaaaggaaagaggaggaaggttccaggctctttttaacaatcggacctcacaggaactaatagtgtgagaagatgtttaacatattctaataagaaagatattcctaataaactgccgtgagataactgctatattggtctgttctcacgcttctaataaagacatatccaatactgggtaatttataaaggaaagaggtttaatggacacatagttccacatggctggggaggcctcacaatcatggtgggaggcaaaagagaagcaaaagcatgtcttacatgacagcaggcaagagagagtttgttcaggggaactcccatttacaaaaccatcagatcttgtgagactattacaagaacagcacaggaaagtcccactcccctgattcaattacttctgactggatccctcccaagtcacgtgggaattatgggaactacagttcaagatgagatttgggtgcggacacagccaaaccatataaactgcagtttattttttcattatgactcatatcataaagaaaaagagttgctccaataatctgtaccccatttcatattcataaggaaaacattcttttcttggctaattgttcatgtttaaataaaaatcttataattttacaaggttttgtcttttacacttgatgctgaaatcaagaagtcttttaaaaaataattttcttttttttttttttttttttgagacggagtctcgctctgtcgcccaggctggagtgcagtggcgcgatctcggctcactgcaagctccacctcccgggttcacaccattctcctgcctcagcctcccgagtagctggaactacaggtgcccgctaccacgcccggctaattttttgtatttttagtagagacggggtttcaccgtgttagccaggatggtctcgatctcctgacctcgtgatccgcccgcctcggcctcccaaagtgctgggattacaggcgtgagccaccgcgcccggcctaaaaaataattttcttttaaaactttgagtacagcttttcactaggattgccaacatgatgaaacgaagatttctcttatttaaagaatatattaaagtgtttattattaattactcttttaatgtaaagatttttgtcttttatggtaatttgacttgttttggtttggtttccatttgatactgaggatgaagggaaattagagcagaattgcttatttacattatttcaaacttccaaccatgaaaggaaaaggtttgggatctcgtttgtaaagccaagtgtgtgtgtgtatgtgtgtgtgtgtgtgtgtttgaaaggggcttatttacactgggttttactttggtatggaggtaactcttatccaagtgtggttggttcgaaggacaagtagggatgataagaggctgcttggcactaaggattaggtagagttggggctgagtcatggttgtgtggaaagctaggatcatggttggggatggaaggaggctaaatctgctacacaatttgaaactagggcatgatagtgtggcaaagaagagatagagcttgaaatagaagtagttacttatttagcatgtgtattaattactatatgattagttcagtgtcatctgactaaaatggagattaatgtactaatgattaatttatatgggttttgtttatattattatctaatacaggctacttaataatctgagttagagagacaatgttttatgagacaaataaggttgctgctatcaaagaaatcaaataaatgaagaatgattatcatataataatgagtgctctctgaggagaaaaaacaaaagtaattgggagtgatttgagggaacttctttaggttgagtgactagaaattgttactctagaaatactctatttgaaaagagacctgaatgctaagaaaaagccagctattcaaaatctatagcaaaccactccacacagcaagaacataagtgaaaactgctaatgaagaaacaaatctgcatgttagagaaacagatagggagttagtgtactgaagtttattgaacggcaaaagaatgttatattgtggaataagtaaaaccatggagaaaaacacattgtagaagagctactcggattgccctatgattttctggaaacttcctggccacagccgactgaaagggacattgtggtaatgctggcttctctagactgaaaccaaagcctatggcttgaaagattaaaaagagataatgagcttaccattcattaaagaaagcaagccataaaaatagcttaaaatatggaataagcgacaggcatgtcaattatttctccttggcactggattaacaaaaagttgttgttggtggtggtggtatattaagtagaaaaggtctattgggcctaaaaattattgacatgtggccgggcgcggtggctcacgcctgtaatcccagcactttgggaggccgaggcgggcggatcacaaggtcaggagatcgagaccatcctggctaacacagtgaaaccccgtctctactaaaaatacaaaaaattagctgggcgaggtggcgggcgcctgtagtcccagctactcgggaggctgaggcaggagaatggcgtgaaccccgggggcggagcctgcagtgagccgagatcgcgccactgcactccggcctgggcgacagcgagactccgtctcaaaaaaaaaaaaaaaaaaaaaaaaaaaaattattgacatgtacattatctattctgtaatgaggccatccctcctagtttccattgcagaggattggatctggaaattgtgttactaagaaaaatgcaggagaaggtttgagtgtccctattcccatatgtagtggattgtcatgcaacatacctctcaacctcttccagtgcatttctcctgtactgcaaaagatgtgcaactgaaaagaacatttcctggatagcatttgatgtcatttagatttagccaatcagaggcattctggtaaattttggacatgctgagggtctttttttttttttttttttttacctgaaaaggcaccagtgtaggggtgccttattttcttgtcagaattaggagagattttcatgtctgataactgacttcatggatataaagaggcagcatgcagcgtgtctgttactggtgcagattgtagcaggtgatcgtgggggcttactgaatggaggagcttcccaaatatggctgctctgggcagcatgagttcctgattgtagaagaggaggtggtttccttggttgcctgattcagttccttctattgtcctgatgattctctaagctatattaaggtctgtaataaactcctttccactcaaaatcaactaaggtaaattttgttctctgtagctattcaatactccatgtctaccacttgaacagacagaataaaaaacctctttgatggcaactcaacaccctcttctgtaataaataaataaattgtgacttgaactcctactctagttggcactatatgtaggaatatggattctggggtcgtgtctgttttcagtgatcatttattaccttgatcagagggagtcctcagcatctttgccctcaaggccaagacacgaagaccctcctcccaattgcccctgaaattgatcttcttcttgggaattttcgttcagcacactgagtcccaatgggcaactgattgcctctttattttttcatggagaaccagaacagaatggaagacttgagcaacatcaaagagttagctatatttgaaatccatataaaacttacattttgagtaatgaataggataccatagagaacccatctcttcttgacatgttttccctggttcatagaaattagatagtaattattttctcttgtttctggcattaaaaacctaagacaaagtcttagaataagaacttcaatattggcatatctggtgggctcaaaaacaaaacaaaaatggcagctataacatctactaggtgtttattgtatgtcccttccaatgcagtacagacagaaaaagaagaagctataaagtttgaagagaaagaaaagctatcatttttagcagatgttataactatgaacaaaggaaatacacaaaataatttcaaaggtagactatgcaattgataagagtgtgtagtgagattgttgatttgaaggtcttgtatgataaagcattgtatttctgtagaaaatacaatattgaagatttttaaaataccattttaaacaacatcatttcatattcataaaagggaaatgtggaaaacacaaaagttaatactgaataataatgatggaattctgccttatgaaaatattaccaccactaccaccatatatgtgtcaatggacaaaaatagccaagaaaattttgcaaaggaaaatcaagaatgaggaagaggacaccctagatatcaaagtatattataaaataataatgtgtgatattggcccaggagtaccaaaacattcccaagaaaggacgaaagatttgagagacaggtgaattcctgaagaaaaagtcatcatgtagtcaaccagcaaatatttattaagcacctactgtataccaggcagtgttctaggtacttagaatattgttgaacaaaatagacaaggtctctcttttgattttatactctaaataaatagatgaataaatgatagataataattgtagatcaatagattgacagagaccagaaaaataagagattatatatttatattatgatcaattaagtgaaaacaaaatgaccaggtagaatagacaatttcattgaattgatttgttggtttaactggcatatttcatttcttcagtaaacaagctgatgcccgtgacatgccaacagctcacagctgttctttggccttcctgtatatttctgcttccattagttgagtttaatgtttgccaaaagttgctggcgtttgctcacaaatctgttcatctctattgacttgttattgtaattatatatttaaataaagtaaatatttcattatgaattaagaatgaattttaaaagggaaattttaagttcttaaaccattaaatgctttggaaataataacgataagttgtctaataaaatattattaaattggatataggtaaaataacttttaaaatggagaaaatgaggtgaaaatctaaagggtttctaaattcagaattctttgtaatgtttcactctaaattctcataaactttttaaaaaactaaaatttgatacgatagaaagtttgttatgggtgttgtttagccatttaagataacctaaaactctaaacaacagatacattctccaagtgaaggtttggttctatgtcaacatactgccaaacaaatatacatgtatacatgtatttacttcagttaaaataaaatgtttaccacattatatatttacaaatcattctaactattctcaactgcaattgacttttaaaaataattgttcaactaccaggtctcacaattgaatatatggctttcacaaatgtgataactgatatgaagaaaattaatatttaactaagaataactgagtggcaactccaaatttggtcatcaggaaaatcttttcttaggttatatttaagttgaaacaaaaataacataaaggagctagaaagaagacaatgtacatgtaacaatcaggaaaagaaatattccaggcagaaggaaccatcctaacgtagactaaacctgaaatgttaaaaaagcagaaatgaggtcagtggcagagatggctggatttccaccaaaatttgtgcactcctcctcctgctgcttagtgatattgctcagaaatggcagtccaagtaaggactccactttcacgcattttcatctaggtggggtcacatcactagttctcaccatgaaatgtgactgaaagtgaagtgtgttgctggcacaccaaggaattaagtaataagtgtgccttctccaccctctctcttttgcctttcatcattggaagcagagagcagaagtccagtaaaagagcagaatcacagcatgtgaagggcctgggttcctgagtcactatgtggagaaaaatatctagactattaacaatctggcaatggactgttatgtgaataagaagagaatgtctatttagctagtcccctgaaatttttatctttattccgtatagcagctggtgttacccaaactaataaaatgagacagttaaaaggtagacagtgaattcagtagtatgggcaaagagcagatcacagaagattttattagccaggcagaagatttgattagccaggtaagaaatctaggtttaattctagatgctataagaaaacatgtgaggtgtttaatcatgatacagatgtggtagagattaagttttataaacatttctagcagttgtgtggaaaatgaactgtaggaatcaagaaggaagtagggggatggggtaggaggctatttcaacaattcaggaggaatacggcagtatgctaaagtcaagtggctacaaagaagatgaataaaatggactaagttgagaaatattttatcatttaattgatagaattcaccaactggctgaatgtggaagttgagaatgtgacaaatcaaggataattcctccttcccctgatgcctttctgttatttcttttattaaataaaaccagtgatgtaaactaaaaagtgtggaagaagctaaaggcaagatactcccacacatctgaagtcatagataggtaggatctagtatttcataactgtccaatctgattatttaaaccttaaataggggcaggactccaagagctaagctgctattgactcctcactagaaaaccttaataacagagcatcttggggatctatacctgaaaacgttcataacaaaagagactcacatggacatgacaaatctcaaatgatattgatatctgccctaattttgccaaccacattttccttgatgactccctccaaaatagacagtagtagcagacacatgttggggactgtgtgtgaggagtgccctgttacataactccagctgcttttgcatttgggtcctagtgactcgttctttctccataagagatcacatccccatgaaacagcagcgggcaacagatttcacctagcgtttcaatatctcatcacattgggcagaagtgatcgttgattatagtttcattgtggttatgttattatttccacctgtattgaaggtagatttatctattatttcatcatagtttgtaggaccaataagagtcatgttcaaagcagttaaggagaaattcatatcaccagagttcctggagttggaggtttttataatttgggattttctcattttagaatgggacaaatgaagcttcagttgtgtaagaactacatatattatactaaaagggagcatcttctgaattttttaatgtgaaaaggaacagagagaaacagagagagaaagagggagagagacttcatatataagagccttgtataatagattatgatagttattatttttattgccactactattatgacctatccagccttggtctttttccatctttgtttaggaaaaagaaaatctgtattcctgacacagaagtgggttcaaatctaaggcctggttaatcagagtcccacatcccatggctaaagtgattggttgagaaactggaatgccactcaagctaagctttcgtcagattatcaaaatggagctgacatgtttgatctgttgctattcagatgatgagctgaaaatatgagatgtccatcttcatagccatgtaggaaatgtttgacttccataggagaaaataagggtaatcaataggaaaaaagccgaactcaaagagacctacacagagaacacaagcaagagacaaagaaatacatacacacaaagagaaacagagactgaaagatgcagggaaataaacaacataaacataaaatatagacaaagaaaaagacaatgaacagatggaatgacagagaaaaaatggcagtgaggcacacaggccagtagagagatggaaggggggaaaagaggtggacagagagacaacccaagaggcagataataaattatatatacacacacatacatatacatatacacacacacatatatatgtaagagagagtcacagagagaaaaagaaacagcgattcagagaaatggatataagggaaaatgcaaatcgaagaaagaaaagctatcaaatatattaatggggaggaggtctttcagacagagatagaaaagagatttgaagagaaaggaagagacaaacagtcagagagaaatatagagtagaatgaaacagaagtgcactgacagaagggaatgagggcagaagggggagagaagggtcagagagacagagggagggaaatgaaagagaagagagaaaaaggtcccatttgtgtccagtatctaagcgtttttcagaagctaaattcacctagaaactttgattgcatgagccccaaaattaatttttccccttaagatggtctaatagagtttccattataagctaccaaaatactactttctaataaaacctccattggtaattatacaattggggaggttggatggaatcaacaatcattgtcttttgccctgaagaacacggtgtactcaccagaagatatttgtggtgccgtttggttaagttatggcattaggtaccatgactggtgcaaaacaattctacttgcacaaataagtgaaactaatcagactattgcagaagccaggaaagactgctgcacacaatcccaacttccaagccccactgataatggaaaattaaatttatttcatatctcatttcacattcttatgtagcacctgacttagaccaagtatggggactcatgatttttgagtgtcctttcctggacattgtcttctttgggggtcataactgaactaaagttctagaatctgatccctttcttagctcaatgtttcccaccaacaccactaccctactcaatcagaattagaaacacaagtgactcacaaatctatttaattttgaaaaactaattattgaattataagaagtttgacatttagttcatgatcagtcttcagaaacagaagaaggtagtaaaagcttatgaaagtacttatggtccaaacagggacagcagacagcagagagcagagctctcattatcatggtagtgagcaaacatttaggaaatttcttgcaggcaggaatttaggaaagacaagaacaagcaacaacctggcagccacttctcagtcaccatgggagtcatgtcctgatgggtgacacagctggcagaaatggcttgctcacaggcctgacagaagagtagctgggaattacagacaagagtaaagccaagacaagacaagaaagaggtgacagatcccagaaagaaaaatgtttgcagtcaatgcgtgagccctctaggagacagaagaaacaatcacatgtcacaccaacccctgaagaaacacagtccctccctcccttggggcctctctgcagttgtcaggacactaaggttgagcttatgtcaacacctgctcctcgttacctttcctggtaactgagtagagatggcaacaggaatgcctcattttattgtgctatgctttgttgtgcttctcaaatattgtggttttttaaaaattgaagggttgcaccaagcaagtctatcagcaccatttcaccaacagcatgtcctcactttgtgtctctgtgtcatatgttcgtaattcttgtaatatttcacgttttcattactattacatgtcgatctgtgatcagtgacgtttgatgttactgttgtaattgttttggggcaccatgaactgaacccatataagacaatcaactttattgttagatgttgtgtatgttcagactgctccactgaccagccatcctccctctctttcgccctctcctcaggcctccctattccctaagaacacaagaacattaaaattgggccagttagtaaccctacaatggcctctaagtaaagtcacttgtctctcactttaaatcaaaagctagacatgattaagcttagtgaagaagacaggtcaaaagccaagatgggctaaaatctaggtctcttgctttcaacaattagtcaagttgtgaaagcaaaggaaaaggtcttgaaggaaagaaattaaaactgctactcaagtgaacatacaaatgataagaaagtaaaacagtcttattgctgatgtggaaaaagtttgagtgatctggatcgatcaaaccagccacaacattcccttaagccaaagtctaatccagagaaaggccctcattctctttagttctatgaaggctgagagatgtgaggaagctgcaggaaaaaagtctgaatctagcagaggttgattcatgaggcttaaggaaaaaagccaccttcataataccaaagtacaagatgatgtagcaagtggtgatatagaagctgtagcaatttatccagaagatctagctaagatcactgatgaaggtggccatattaaatcatagattttcaatagagatgaaacagccttctattggaagaaggtgtcttctaggattttcagagttagagagaagtcaatgctggcttcaaaacttcaaagatcaggctgactctcttgctagggactaatgcagcaggtggctttaaattgaagccagtgctcatttaccatttcaaaaatactagggcccttaagaattatgctaaatctactccgcctgtgctctataaatgaaacaacgaagcctgataacagcacacctgtttaaaatatagttggctgaatattttaagcctattgttgggacccattgcccagacaaagacattcctctcaaaatactactactcattgacaaggtacctagtcatccaagagctctgatgaagatgtacaaggagatgagtgttgttttcatgcctgctaatgcaacatccattctgcaactcatggatcaaggggtaattttaactttcaagtcgtgttatttaatatattacataaggctattgctgtcagagacagtgattcctctgatggatctggggaaagcaaattgaaaaccttctgaaaagccttcaccattctagatgtcattgggaacattcatgattcatgggagaaggtcgaaatatcaacattaacaggagattgggagaagctgattccagccctcatggatgactttgagacgtttaagacttcagtggaggaaggaactatagatgtcatggaaatagcaagagaactcgaattagaagtggaaccggaagatgtagctaaattgttgcaatcttatgataaaacttgaatggatgaggaactgctgcttgtggatgagcaaagaaagtggtttcttgagagggaatctacccctggtgagatgctatgaatgttgttgaagtggcagcaaaggatttagaatattacataacttagttgagaaagcagcagcagggtttgagaggattgactacaattttgaaagaaggtctactgtgggtaaaatgctaccaaacatcatcacatgctacaaaaaatatttcatgaaaggaagagtcaatctatgcagcaaacttcattgttctttcattttaagaaattatcacagccacctcaaactgcagcagcagccatcaacatcaaggaaagaaccttctatcagcaaaaagattataactcactaaaggctcagaggattgttagtatttttagccataaaatattttaattaaggtatgcacttttttagacataaggccatttcacacttaatagactactatatattgtaaacatgacttttatatgcactgggaaaccaaaagatacgtttgactttcttgcagtgctgtctggaaccaaaatcacaatacatctgaagtgcactttactctgttaaagtgaacacaaaacatcagcttgaaggggcctgtggaaggcagaagaggatgtcgaaatgctttggtgatgcacaggtcgtggactaactggaatggtaacaactgtaattccctctcatctcacctatcaccaagttcagcagcactctctgcaatttggggatttgggggcatcatctaagcctcactgaatgactgataccacaggtcgggtcttattctgaggaataatccctgaagtttagagcagagacttttcagaacattccagaatttttccagaattttttccagaatattccagaattttgtttcatgccacattcattcaggaacagcaaaataactgaagcatgttcaggtgtccagagaaacacactcaactcttttttccaccttatgtgtgtcatatttctgggcaaggagagcagggatcttacctgtgagtggagccctgtctatttaagaataaccctccaccactcccttctgtaatgatgcagacatgacccaggccagggagctctcaatgctcctaatttctgtgatctatttccatccccaccttagctgcctttccattacagagtcagacaggacgagttacaacaaaaagcctcagtcccagcaccagtctctccatcttcttcaaaggtgccttacctttcttattccaaaaatggctgggccacaaggcccaaaccaagagagatcagccccagcacaagaccccaaaggccactcagcatcttgctctgggcagattcagacagtgtccctgggaagtgaaagcctgtgtgtcagagcctgtccccacaccccacagtgtcctcatctggaagcctggagtcctatccaggatgtaagagacagaggtagtctgtcaccaagcaaaggagatgacaggcaggcaaagaccccaaggggcagcatggatggatgaggaggaggggaaaaaggagatgacaactcctcaaggatatgtccttctataaccccacagaccatctccaagacatcagccctaaggtcaaaacctagaactataacacctcagaaggcacaccgacaaggctgacctatagtctgggagtcaggtgatgcaaaggggccaccataataaactgggagaaaaggaggtcagttctcagaaagtgcattttgacttgagacaatgggatctcagtcttccatgactactagtccagaaattatatcgggatacagttgtgtaggagagaaggtatgaaaatgtataacaagcagaggttagtagtgacctcacccccacaagacccagaactcccccacccttccttttttccattgaatttatgatatcaataaagtgctccttacatcattctactgtgatgggactctggaggctggggtgctccagatggtaggtgtagacatctccatgctcgggtattatttctagcattacaagaatctggtaggtctaatccctattctgaataggtgtggatacaactccagcagtctgctcctgttttttctggaaccatctgagtttcacttggcaaggaaagaaatttgtcaccaaacagaccagcaaattgtgatggctgacctctgtcctagctggggagatggtcactgcaggctccactaggacgaatgacaacaggaaaagaaacttagagggtaaggcagcaaagaaatcctcatcatgggctcacatccctcctttgatactaaagtggaaaagatagcagatattaactagtcttctactccaatcccagatctaggttttaattagctaagtattaagtagcttgttagcctactctttagaaaagcaatacttttattcagtggtcacttgtttattaaaacagatcattcatgtgaaagctctttgtaacatagactgataatatttcaaatactcgtatatacatatatgtgtaggtatatgtacttgctttcttatgtctggtaaaaataataattaaaaaagatctgacaatgtgtaactatgtgtgatttcttacaaaacagagatcttcatgtttaagtaaatctttagctccattattcacaggttttagggaaaactggctagccatatgcagaaaactgaaactggaccccttccttacacctcatacaaaaaatttttgacttttctatttctcctttcatttctatcggcttttgtctcatgtatttcgatgctctgttgttaggtgcatacacacttaagattgttatgtgtctttggagaaataaccccttatcattaaataatatccctttatccctggtaatattccttgttctgacatctactttgtctagtattgacataattatctcattgtggttttgatttgcatttctctaatgacctgtgatgatgagctttttttcataggtttgttagccacataaatgtcttccttttgagaagtgtctgttcatatattttcaccactgtttgatggggttgttttttttcttgtaaatttgtttaaattccttgtagattctggatattagccctttgtcaaattgatagattgcaaaagttttctcccattctgtaggttgcctattcactctgatgatagtttcttttgctgtgcagaagctctttagtctaattagatcccatttgtcaattttggcatctgttgccattgtttttgatgttttaaagtctttcccctgcctatatcctgactggtattgcctaggttttcttctagggtttttatggttttaggttttatgtgtaagtctttaatccatcttgagttaatttttggatgaggaggaggagaaaaaggggcggcaactcctcaggagtatgtctttctataaccccacagaccacctccaagacatcagccctaaggtcaaagcccagaacttcaacacatcagaaggcacactgacaagtctgacctgcagcctgggagtcaggtgatgctaaggggtcaccataaaaacctgggagaaaaggaggtcagttctcagtatgtccttttgacttaagaaagtggtccaatttcagtttctgcatatggctagccagttttcccaacaccatttattaaatagggaatcctttccccattgcttgtttttgtcaggtttgtcaaatatcagatggttgtagatgtgtggtgttacttctggggcctctgttatgttccattggtctatatatctgttttggtgccagtaccatgctgctttggttattgcagccttctaatatagttcaaagtcagataacgtgatgcctccagatttgctatttttgcttaggattgtcttgctatacgggctcttttttggttccatgtgaaatttaaagtagttttttctaattctgtgaagaaagtcaatggtagcttgatgaggatagcattgaatctgtaaattactttggccagtgtggccattatcacaatactgattcttcctatccatgagcatggaatatttttccatttgtttgtgtcctctcttatttccttgagcagtggtttgtagttccccttgaagaggtccttcacatcccttgtaagttgtattcctaggtattttattctctttgtagcaattatgaatgggagttcactcatgatttggttctttgtttgtctgttattggtatataagaatgcttgtgctttttgcacattgattttgtattctgagactttgctgaaattgcttgtcagcttaaggagattttgggctgagatgatggggttttttaaatatacaatctcttgccagtcagaatggtgatcattaaaaagtcaggaaacaacagatgctggagaggatgtggagaagtaggaacgctgtacactgttggtgggggtgaaaattagtccaaccattgtggaagacagtgtggcgattcttcaaggatatagaaccagaaatatcatttgacccagcaattccattttggtcatatacccaaaggattataaatcattctactataaagacacatgcacatgtatgtttattgcagcactgttcacaatagaaaagacttggaaccaacccgaatgcccatcaatgatagattggattaagaaaatgtggcacatatacaccatggaatactatgcagccataaaagagaatgagttcatgtcctttgcagggaaatgaatgaagctggaaatgatcattctcagcaaactaacacaggaacagaaaaccaaacaccatatgttctcactcataagtgggagttgaacaatgagaacacatggacacagggaggagaacatcaagaaaaaaacacagaatattataacactgcaactgtggtgtgtaaactactcttattctaagtagtaagactacgtgatgaaccaataaaaaataataactacaacaagttttcaagacatagtacaataagatgtaaatagaaaaaacaaaaagttaaaaagtggggagatgaagttaaggcaagtttttattaattttcttttgattttgtttgcatggtatacagtttcattcattttacttttaatgtaggtatgcctttatatttaaaatgggtttcttgtagacagattatagttcaattgtgccatttttactgtctgatcttctttatcatttaattggtgtgtctaggccaattatatctatgaaattatcaacatggttggattatttttgctagatattttttattaattctattaaacgtttgttcattttcaaaattgtttttctgccttcttttggattagtttttgccctaggattttacatttatgtataatatactttcaaatataccttagctcagtatgctccaaatttctctctctctcattcattgtgcaattgttatcatatacttttttatattccataaacacacaatatattgctactaattttgctctagaccctctgttacctataaggtaacctttcaaagacaattccgtttgttatttaatatcatccccaccaattctttgtcagtaacaactcctatatgaatgaactagttgctttaaacagctctcttaaataaactacacaataacaaaaaaatagtatggggaaaatactgctccctaatagtcttctgtgggaaaacacgcaaaattactcccatgtgcagatctgctttcaccatagccccaggttactcttcagctaaacagaataggttatttgataaagactttgtgcagagactatagtatgtaatcaataaatacttgttgagttgaactgaaattcttaattcatctgaatcaggttgtagaactgactactgggaaacagataatattcctcacgcctaatagcgattgattcttttcctaggagctctccaatcctaatgtacatattgtgaacgttctttgaatagatcttttcatttatttatttttagagacggggtcttgctactgagacagccaggtgggaagggatccccagataaattccagccagcctgagcactgggaggagtgcaaactgggacggagccacagaagtttgcaccatttgcggcagggaggagagtgacccctcttctttgggtggaacgtggaattcaatctgtgaggtgggaagcccactggcagaaaaaaaatgcattctctcactttgctaagagcctctgtttccccttttcttccttttcacccaatactcaaccttcaagttgtcctactcacccttcaagttgtctgtgaatgtaatttcttgtggctgtgtggcaaggacgctgtcattagctgaactaaggaaaagtcctgtaacactatgtttcccaggctggcctcaaactccttggctcaagtgatcttcctacctcagtcacctgaattgctgggagtataggcacacacctccacagtcagctgtacagttatttttacttagcattagtgattttaaaatgacaaataattttaaatggaaactttaaaagcaagtgtttatatgaaattattcatatgtatttaccaaaggtcatcatgtatatgtaaagcattttacctagaaattttaagttgtgattttgccagaacattaaaaacagaaataataacacaagaataattcaaatgttttaataactgacaactttagggaaaaatgaatccagatatgtgtgatgtttggggattttgaaaaatacctcaaacaaaagaaatattttataaattatttacaatgatacaagttgagtaaaaattattcttgctatagtatttctctaaaagtatcccattgactaaagaagattggcaaggacaatcttgcacctgagagatggtggagcttgaaaggcttacaatgggcactaaagagagaagatgggggcaggggaatgcttccactctcatttgtcctcctctccgcgcctatgcacttgagatagtcatgcattcattattatctttgagtcgtgggaatattggtgtccatgggatttttgcaccataagaaatgtaaaaggaagacctttacacggtagccatatgatatcacatagaaacctggatctatacaaagaaataaactctggaaatgaaacattttttcacatttaaaaaatggtctaaaatgaggcttctcaacctcagaactgttggcattttgtttcaggtgattattttcttgtaggaggctgccatgtgcattgcaggatgtgtaacagcacccctggcctctacccaatacatgccagtagcaccctccccagtaatgacaacaaaagtatctctagacattgtcaagcatcacttgcaggaattttctattggccccattttagaatgtctgtgttacagaatcatacgaagatactaaatcgttgttggaagtcattaagttttggaatagtttgttacatagaaaaatctgacagatacaacagtcttcaaagaagttctgtttcctagaaatctcttagtgtttctgtggctcacaggctcctatatgcctggagtgccacagggagaagcttaaatgaatgaagaaaaagtaatagtctgtcccagcccaatgtgtgatgttactatcattatcattattaatatttgtctttatgtagcagctcccacttgggaatagttgctaggtgtcagacactggcctgtatttaactgtataatttgtacttatctatcatttcatcatattaattatcttctaatagttttcatcccacattatagaaaataaccctaaggctcaggtattctgagtggtttgcccagggtgatggagctgagaaaatcaaaagcagcatggaatacatatttattttattacaaaatctataatatttttattttgctactctagactctgttattgttgtgaagcacctttaactactgcaagatagaagtctcggccttcagagtaaaatttcatcaatgtataaaattagacttaaagatagggtcttagagaatgttataactgctccttagaactaacataatttctgcctaatttcttagagggcccttaataatatcaattgtaatggcatatcccattgatattttagttacaaaatcaacggcatgtcaattagtgctttctaagaaagttattaggcaaagtagtattttgagctccaaattttattcccattattactttatgaaaaggacttttttcttttcttttcttttctttctttttttttttttttttttgagatggagtctcgccctgtcaccagactggagtgcatggagtgtagtggtgtgatctcggcttactgcaacctccgcctcccgggttcaagcgattctcctgcctcagcctcccgagtagtagctgggactacaggcgcgtgccactacacccagctaattttttttttgtttttgtttttgtttttgtagagatggggtttcaccttgttggccaggatggtctcgatctcttgaccttgtgattcgcctgcctcagcctcccaaagtactgaggaccttttctatttctacaagtaagaaattggtttctgttaaaatggtatactgttcttctgagtctaatttactgattattctatcttgcattaaaattatgacctgaaaacagaagcaaatagaacaaggttcgctatattctggctggatgaagcaggaggaggagagggacacaaaaccagttaaagatagaaagggcatctattatcttttagtcaatgacctggccttgcttggactttccctccatcccacaggatgtgagatctgagactgaacccatgacttcccttctaagatacaattctgatcccacatttaacaccctaacttcctaattagagttgagttttttaaactgtgatattaataggggaaattctggagtactatcaggaaagatttagttcatttgccaaaatcttaaggaatttctgtcagatacaaagcaggtaagtctggatacaggggaaaaaagatagaaatgtgttatttactacacagcaaagaggatgctgcacggtgaagggagcagagctcaactgcaacctccaaaaccctcttagttcacaatggcagtggctagaaagagtaataaggccacgtacagtgtcatatatctctcctaatcgtattagggcacttactcagaatccacacagaaggagacacccctcacccctcatgaggaatcatggcttgcccctgtagcatcccatctctactacttacgagccatgtgaccctgggaaaagtcctttacctctctgagttttaatgtcctccttgaaaaatgtggatgatactaaagtatgacaagtatttataaagagtaattcattccaagtgcagtatatgtacattcctcacaaccgcctaatgaggtaccatcagtgcctccggccaaagaccacgaagagcatacccttgaatgaacaagttggctttattgtccgttgcaatgatggagaaaagtcaccatggggaatcatgcagcagttcagtaagagattgttggaaccaaagaagtagaactaggagaacacatatattaagagaatgactgaaaggaattaatttgtgcaactgtgcgggtggactagggaagcctaaaacccactgggaggcagtcatcaggaaaggcaggttgaaattcttagcactggctgacgcgctgtccacagtggaatttctgtttcctcagagaagcctcagctctgctcttaagacttttcaactgcttagactaagctcacccaatttatctcagataaattcttacttaaagttaactgattatgaactttaatgacatctacaaaatatcttcacagcaacacctagattattagtgtgtgaataactggggaccacagtccagtcaacacataaaattgaccattaatcaattgtaagatttgtgcttgtgttaggtagttttgaggaggatttaagaaagagggacttcatttttaactggattctgacagaaagcagggagtggggatggcaatgctatgattgggtagcttcataaatactacctagagggacggaagactatcctgaggctacggctgtgattggtaaagaagcagcaatcactctttcgagagatgtgcctggttatttttgtagtttggacaatattcatgttttgtctgggtgcagacgtgatgactgagtggccttattttctgtctcagtccatcacactcatggagtacctgtctgattctgatgttctatgaaattgattatcttcaacaggagaatcaaaaccagctgtgaacaccaggctagctcctagcaaccccaaggccttgttaattgcatccaggcagcccccaggtatcaggacacttttttattttacctttttttagtctctgccattgggaggcaagacaacatgctgagaatctcagaaggccattcaacaaggacagagtgattctaaacgaaacctccattactaacttgttgtttctataacatacagaaaatagattcatctgaaaaaaggtaagtttccctgtgatgactacattttagctcattccctagtcccttgcaatatctgaaatcttaatgtggttggataacaaatatgaaaagatccagtagtttaagaaaagtaaacctattttctaagttaaagcaattctccttattctactctcaatatttgacttgacattcttaaatttaaaaaaaataattactggccgggcgcggtggctcacatctgtaatctcaggactttgggaggccgaggcaggcagatcacgaggtcaggaaatcgagaccatcctggctcacacggtgaaaccccatctctactaaaaatacaaaaaattagctgggcgcggtggcgggcgcctgtagtcccagctactcgggaggctgaggcaggagaatggcgtgaacccaggaggcagagcttgcagtgaaccgagatagcaccactgcagtccggcctgggccaaagagcgagactccgtcttaaaataaataaataaataaaataaaataaaataaattattagagtaattgagccagccaaagcttttttaatgtaatcaatgtccctaaatttcctttaaatatattcaagcagcaccgaaacacagagcataaagattactagaagcaaaagaaaaaactgtgtaaaagatcggttactgtaggcagcaccgcatgacagtctaacccctttaattgccctggtcaaaaacacctggagcttttgagaacttacccaactggatttatacaagtagaaaaggcaaaggtattgcttggctaccaccagcagagatccctaggaaggtggggtcaagtcaaaatttggggaataccatatacactatggaagcaaaaagaaaaacagctaacccacatacagaagccagagaaaggggaggggatggggactgccagggaggaaaatcacttcagggaagaattcctggagaatgtaacccagaaaaccctgaaggatgccatattattgatgaccttacctatccaagcggctgctcagaaattcccgcccctcttgacactagcagacatgcacacatgacagaagattcagatttagtatcttccctttatttatagaaaatttcctcaagaccatgctgtgtggaggatgtgtcagaaccagaggatgtccctgtcttcttccagggctcttaatataaactctgcaactggcaaacaatatgtcaccataggggatttttctgattggccaaaacctgacctggcagggtttggtttgggtgtcttcagatttgcttgtctcgaggtcctcacaattgctctacagctcagagcagcaactgctgaggctgccttgggaagaagatgatcctaaacaaagctctgctgctgggggccctcgccctgactgccgtgatgagcccctgtggaggtgaagacattgtgggtgagtgcatgagtgaggaatgttctctggagctgaaaaacagcaaattaaaggaaaagaaagagtgcaatttgctaagaaatagtagaaatttcccaagggtcttttcaatattaagaaattttaaaattatggcagttcctcctttaggaaaccagagctccaaccgactctctttgctacctgtgctattggagtttaccaaggacgttgttctgtttatattatatccagagactatagcctggaggtctgtgtggcattccatcatgattgcctcaaagactagggatgtttccatgaatggagtatttttttgttattaaaaatttctgaactgttactcccaaatttctctgaacaacttttgaagcttttcatatgcctcctatagcatatgttggggtagatagttccatgaagtatgtacactctatagatataaagaaagaggttcttttctttctctcagacttacatttccacatgggaattggcacaggtggggagtaggtgaaagagcccagcaggctgaatgccttcaacaatcattttaccacgtggtaaatgtggtacttactctctgctacctcatatatgtcacctcgcttatgatcaaataaaatgggcatgtagatatgctttatgaatagtaaaaacatgaatgtcaactttttttaacttattcctattacaggtataacttcgtattttttctttagcaaagtaaggaatatattttaaaactgagaactttatgataaaatgcttggtaaattaaattattttattctcaaattgtcaacccaaattacttgttcttcaccttatctaatgaagtcttataaagagaaaaatgggcaggcacagattatttggtcccttagtcccctctgcctttgtcgtccatctctttccacctctcttcatgcatccctttctccctcttccctttcaggatccatctctgactccctgctcctttacagacatgggcagtgggtttgtaaaacaaaagttggaaagtcaaatagttaaaaggggaagtgaactggaagctactcgaaacttccacaaccttattaaccatagctgctcccattctgattttgtttggcagtggaagtttcacctgcttctccagagcacttggcttttttttttcaaatctcctttcttcaacctcacaccagagtgccccggtcaggctcgacttatccattaggaacagtgtgggcagtgaaggagactctccaaactgtaaagctacaagagaacgttttaactcgttttaaaattagaagaaaaatgaagttttacagtctatgaaaatgttttaacttttttttttttttgacggagtctcgctctgtcgcccaggctgtagtgcagtggcgcgatctcggctcactgcaagctccgcctcccgggttcacgccattctcctgcctcagcctcccgagtagctgggactacaggcgcccgccaccgcgcacggctaattttttgtatttttagtagggacggggtttcaccgtgtgagccagaatggtctcgatctcctgacctcatgatccgcccgtctcaacctcccaaagtgctgggatttgtacaggcgtgatccaccgcgtccggccttaacttttaatgtagcctggattgtatttgtctttataccaatacaatcagaagctgtaattttccgtatttttatggaggaaggcgcccacaaaagcaacagtgctcggggctcacaagtcagaattcagccctgggcatccctgatcctgggctttgcgtggttctgctacctgggtgcctgtcagtcttccccaaaatctatgtaattgtcaaaaattgcaattgtcattcaatacacatgtttgagcacacaatgagctaacttttgggaattcaaagataaaaaatcatgctgtctgccttgcagagggtgcacaaaccagtgatggaaacagtatggggcacaggaaagcagaaggccctgctgagcaggacagtggcccagcagaggctgaaactataaaaatgacttggttccagctgggccagtagagtgatgtcctccagcaacactcagcacccaggacaagtaccagatgaaaagaaggattgcatgtattccacatatattcatgtttgaacaaggagtcaaagtttattgtaaggataaggagtctttgttggtggcctgttaagtaaccaaccagggcagtcatgctgggtagggaagaaggtgagctggaggaggaacagacaaacttggagagccagacattgagattccattgaggcgttggaggtcacaacgcggtcaaaaacatgttgagagcacttagctgcaaagttgttaactaagtagaaacctcaaggatgaattttaggatttctccaggaaatcctaaaagataacttctttcagggagaaaaaacagacccttgcaaagacatgaaaggaagtgtagtttggtttgattggcagatagttgtgaagaatgtcggactgtaaggctgtcgatatcctcctcacagaactccccaaagtacattgtatttgctcccttaccgacctgattctcccactattcagttcattccttgatgctgttttaagcaacccctgctctgtctgacacttttggatgctcagtaaatgaggaaggaaggaaggaaagataaaatggtaaagggctcacacatgtcttaacaaaaatgtccagttcggctcatttggctatacttcatggctgctgctctgcccttgcatcctcggataagctcactgcccattagaggaaaaagggtttaatttacctgagtcctcgagtgaatgtaattgttgaatcagaacactatagacatttagtaacctccttcagaggaaaaaaaaaaaaagtgggggcaatgacagaaattaaaaaaccagtcgagcttccacttttcatttcagaagaaatcaggtgctctcctctaaggaccactactattaacaaaacagagaccttagaagaattgtttatttgttataaatgtataatgttgctattcttgtaatagtctttctcgtaccctataattgttagaagaaattcttttaagttaatacgttcctacatgcttttctttggtttaaaaaaaaaagaataaaggaaactctgtgtagaaagtgtcctgttctgatctagtcctgacaggaaacgaagtataatcaacttgttattaactgagagagaaaacttaggaagcagagggaaataaactgaatctctgagtaagaaaactaaatcctatgataactcattcattccttcctttgtttattgcaatattcatcataagcttatgatgtgccaggcactaagtaggcactcaggaaataacagacgtgtgacgttctgcctttgtggagcatatgttatagtgagaaagacagaatcagttctaacctgatgactaccaacgttaggcaaggaggaagcaggtgttaggaagattgttcagggactgtgccaaagatgaagcccataatatttgaaagtgagtttcttcaatcactttctgtattaaggttctttctccctgtgttccaccctcctgcttgtcaccttcactcgtcagctgaccatgttgcctcctatggtgtgaacttctaccagtctcacggtccctctggccagtacacccatgaatttgatggagacgaggagttctacgtggacctggagacgaaagagactgtctggcagttgcctatgtttagcaaatttataagttttgacccgcagagtgcactgagaaatatggctgtgggaaaacacaccttggaattcatgatgagacagtccaactctaccgctgccaccaatggtatgtgtccaccattccgcctctctttactgaaactaatctttcataccaagttttactcccttcttctcaagagatttccggatcttctcatggtaattgctgaaattttatcatctcccatctctaaaatcacatattcccatgtaatacaagggtctttccattatgtattaattcctactttattaaacatgcccacagagagaagggcacaggaataaagcagaggcaatgtgtcgttgctcccaagcagaaggtaaataagacctctttgactatcaggtggtgaaatgctggtaagagggctcttccaggatgtaatgcagaagctcatggcagagctattcacacttcacatcagtgctgtttcctcaccacagaggttcctgaggtcacagtgttttccaagtttcctgtgacgctgggtcagcccaacaccctcatctgtcttgtggacaacatctttcctcctgtggtcaacatcacctggctgagcaatgggcactcagtcacagaaggtgtttctgagaccagcttcctctccaagagtgatcattccttcttcaagatcagttacctcaccttcctcccttctgctgatgagatttatgactgcaaggtggagcactggggcctggacgagcctcttctgaaacactggggtaaggatgagttccaccacttcatgggtttctaataacagacttcactcttctccctaagcctggggccttgagtcttgcagagccagccctccaccccatcccatcccacacacatgcacatgagcacactgcacattctgacctcaacagctccactttcacagagcctgagattccagcccctatgtcagagctcacagagactttggtctgcgccctggggttgtctgtgggcctcatgggcattgtggtgggcactgtcttcatcatccaaggcctgcgttcagttggtgcttccagacaccaagggctcttatgaatctcatcctgaaaggaaggtaagattgagatttgttggagctgaaacctcagtatgagagggaggaaagtgggagggggttgtggacatgaatgtggttgaaagttgtaggcgaattgggaagtggcatgatgatcacacaggaggcccctcagacccatcgatctcatgtctgtcctgttgcaggtgcatcaccatctacaggagaagaagaatggacttgctaaatgacctagcactattctctggcctgatttatcatatcccttttctcctccaaatgtttcttctctcacctcttctctgggacttaaggtgctatattccctcagagctcacaaatgcctttcaattctttccctgacctcctttcctgaatttttttattttctcaaatgttacctactaagggatgcctgagtaagccactcagctacctaattcctcaatgacctttatctaaaatctccatggaagcaataaattcccttttgatgcctctattgaatttttcccatctttcatctcagggctgactgagagcataacttagaatgggtgactcttatgttttaggccaatttcatgtcattccccagatcatatttcatgtccagtaacacaggagcaaccaagtacagtgtatcctgataatttgttgatttcttaactggtgttaatatttctttcttccttttgttcctacccttggccactgccacccacccctcaattcaggtaccaacgaaccctctgcccttggctcagaatggttatagcagaaatacaaaaaaaaaaaaaaaagtctgtactaatttcaatatggctcttaaaaggaatgacagagaaataggatacaagaattttgaatctcaaaagttatcaaaagtaaaaaattttgttaccaaaagtcaaactgcattctcaaaactttaaatttgtgaagaatgacaacagtagaagctttcctctccccttctcaccttgaggagataaaaattctctaggcaggaaaagaaatggaagccagttagaaaaacattgaaataaggccaggcacggtggctcacacctataatcccaacactttgggaggccaaagtgggcagatcacttgtggtcaggacttggagaccagcctggccaacgtggttacaccctgtctctactaaaaatacaaaaattagctgggcatggtggtgggcacctgtaatcccagctactcaggaggctgaagcaggagaatcgcttgaacctgggaggtggaggttgcaataagattgtgccactgcactccagcctgggcaacagaatgaaactccatctcaaaaataaataaatacatataaataaattttttaaaaaagaaaaatattaaaataaggcaataatataagtgggtatctgaaaaggaacaaatgcttgttccttacttagggttagtgacaatggaaaacagatagaagtagaagctacagacccatttaggggccccagccccctgctcctcccccttcctggctaaggaaagcatgagcctatgagagagaaatcctaggaagaacaagacagttgagacaatgtagcagcagtagtgggtgttgtgtcctacactggattcgtggtctcctaatagaaaatctctcagaggaaatgggtccacagagacctgagggctctaaacagctatgaaatctgccaggatatttctgtccatgctatctgcatcagtgagtttaaaatgtaataggagaaaaaaaagagacaaaacattaacataataattgatacagcatagttttgtacaaagaaacctaaatccaaatacttgactcagtattttgaagctaatattttaaactttactgggtaaagtatctgattgacatttctgaaccttatttttctcatccacaatgtgggagtgataatattttccttgcagagttattgacagaatttgaataatcttggtatatagacagtgccttacacgtagtatataaatatataagaaaacactgcagttatgtttataatggatttattaaaaagaatggatcatattatatgaaaagtacatttgttttccttagccctttagtgatttaggagattcaagcgtagacgtaaaagtgagtttcttttcatatgttaactggaggatttttttctttcttgagaggctgagattgggttgataagagaactcttaggacaagaagttgtaatatttgacttcggtttttaactctctaaggggtatattccctccttatggcccataaattttaagtcaaggtgaattatatgcaacagcagtttatccatatttactttggggaggaggtggggagactccgggagaaaataattataaatgcagactgggaattagtaagtgcagggaatctgaaccagtggtgatcatgaaaacgtccatcacagaacacagaggatttttagggcaatgaaactactctatttgataccacaatggtgaataaatatcattatgcgcttgcccaaatccatagaatgtacaacaccaagaatgaaccttaatataaactatggactttgggtgataatgatgtgtcagtgtaagttcataagttgtagcaaatgtacctctgtcgtggaggatgttactagtgggggaggctatgcatgtgtgggaacagagagcatatgggatacatctatctgtactctacaatttttctgggaacctaaaacttctctaaaataaactctattaaaaaaaaagaaaagaaaaggtcaacaataatgatcccaaatatataaaattaaaactgtagtataaaaatggtcacatgaaaatgcatgaatgtgctaagaacttttctgcaataggatttaaaataaattttatataaatttcaatgattcatgagccaagaacccagcattctggaggtgtgtgcatttgtgtgtgtgtgtgtgtgtgcgtgtgtgtgtgtaaggcttacattgaatggcattataaccagagtcatacagaaatacacaaatgctcccctatttagaatccttccccaagaaatactgaggaaagcaaatataatggtagttggattttactgaaagaatgtattcaaaaagtatttatataatgttaaaatagcatagttaaaattagttttataaaatagagcaaatatatctttttatcagctaaaagttcaaagtgaaatcatcattattatattattatattattattataaacagttataaatcaggctgcatgattttaaattaaatgattattaaaaattgttatctgaattatttcagattacatacataaagtatgacttcattaataggtaatatcacattgttcaaattttacaaaatttccagtcacaatggttcatgcctgtaatctcagcacaaggtgagggtcccttaaagcccaggagatggagaccagtctgtagtcccagctagtagggaggctgaggcaggaggattgctgcttgagcccaggagttcaaggctgcagtgagctaggactgactgcaccactgcactcgctccagcctgggcaacacagcgagaccccgtctctaaaaataaataaataaatgaatgaatgaataaataaaaattacaaaacgtaaaaatcacgtaaaatatttcaggtttgtacttaccacatacaaactagagatatgaagaattaaacattacaaataaagcacttcacacacagactggcccatagtaagcagtttatagaaattaacaaatttgtgttattgttattttctggagtccaagacaaaatcccatgatgaatgacaccacaaggatgtaagcaacaaaattcagaatatgagaagttctactagattaaataaaaagatttctccagcaaacaatttgcaaaaaaagttaaaaatagagaaaagaaaagctatacacttgaaaaagactgaagaaatatagtaaccaaatgctgagctttgtctagattcatattcaaacaaaacatctgttaaaaaatttatatgaggcaatcagaaaaattgacactgagtgtattaaggaattatttatctcgttttaaatgtgttagtggcattgctgttatgtttctaaaaagccattatattttagattttcataataaaaatgtataaatgaaatatgatacctaaaaatatcttcaaaataatccattatgtgcctgtatgataactgggtgggtttacaaaattgctcatgaattgattattgttaaagcaaggctgttgatacatggaattcttctctgtactattgcacacagttgaaattttctgtaatacaaaggtttttttttttaaatgtattcaggaaagtcccataaacataggcagacaagcattctgtttgaagttatgttagtttttcagtttttctcatttttatcacatttaggaaaccctgtccaaggcctgcccaagactgtaagaacctctcaggaatgcaactgtaaagaatgtgtatgcaggaactaataataacaaaggaaagcaaagtaatgcttgctttattattggctggactaagcccccagacttgtttatatattcactaattcatcaaaaatgcaaaaatggtcattgagtcccagtgctacaataagtactcatagtttgttgaatgttattaaaataatgtgaaaacaattacattcattatcttcatagaacttacactccagtgggaggaaaatacatatattacataattccacaaacatagttacaaggtctgaaacatttataaagaaaaagaatgaggtaaaatgagagagtgttgcacagggaccaggtatgatttggggcagtttagaagtggcttgaagaaatgtatcttcagatgaaataaggtggtatacagtaggtaaaggacaaggttgaagaggccagagcaaatgtttgagaaactcttacaatatgaaagagaagatgagaataaaataacatgaaaattatcacagatttaatagagaaagttcatgtaacagcaaacaagtttaaagtcattctaattagaattcttgatctgtaaaagtaataatagaatgctaaaaacaattggaaaatttaatagaaagattggaaaattaaatcaagaaaatctcacagtaatttaaaaggcaaaaaaaaaaatataatatatggtagaaaaaataagatggagaacagaccaaggaagtcaaacatcaagtgacaaagctagagagaccaacagggaagatgaagggagaaaatgatcagaacaaataataagggaaaattttccagatataaaggatttaattcttccatggaatagtcttgtcaggtatttagcaaaattaacagactcacttctaaatatctcattttcaaaatttcagaacttcaggtgttatagaaaagtcataaaatattccagtggcggaaaccaaaatgaaacaaactgacaacaaaaaaaatacttctattattaagataatgagaaagtccttgaagttctaaaggaaaattattttttattaataaatgtagatcttttcaaagtcacaatcaggcatggagaaagaataaaaatacctgtgaatgtgaaaggacataaaatttacctaccacgcagagttttactagaaattgactaaggatatgaccaattgagattgttaatcaggatataggaaggtaaggaatccaggaaactgggtttaacccaggatctcactgaaaagggatcctactacagcagtttcttggcaagcaaagaatacctgactacataagtgatatttagaaagtgataaactttttttttcaaatttagaattaatctgtgagcaaagcccaaggaatcttattgctacagcagaatgtcaatattttcagctttgacaatattgggggaaaaaaaaagatgtagatacttaattttggcaactggaagcgtaaaggagaggggaaagggagggtaacaatgccaataacttcatcttccaagaaggaggggaagaggcattgcccatacttacagaagtcacaaagatcaatatatttaaattacaatcacaactggaaaaagtatgtaaaatgactcatgaattagagcaaggttttagaaattggactattatttcagttacaaaaaaaatggactgttattcttcggcctaagctattcagaagctgcaagagcccctcagagttggcccaaattagagcaggcttttatactcctatactgaccaatcattataggtgagttcctcctgggaagtggatcaaaatccgatgaggcagctttcatcaccaaaggcaattccggggcatgactgacagctgagggcagtcagccagcaacattcccagcaatgacagaataaatcgttcagtctcaaagggaggagtttaggtacagtggaacagcaccgacggcagaaacactgttctagttcctgggagtacatatacattcatgtggaagaaaacaaacagataaaattcagcatctatttaaaaattaaaaataaaactaccacatgatccagcagttccacttctgggtacatatgcaaaggaaatgaaatctgtatcaaagagatatctgcactcccgtgtttattgcagcactattcacaatggccaagagatggaatcaacctaactatccatcagcagatgaatggataaaaaaaatgtggtgcatatacacaatgaaatactattcagccgtataaaagaaggaaatcttgtcatttatagcatggacgaacccattggacagtatgctaagtgaaataagccaggcacagaaagacaaatacgacatgacctaacttacatgcagaatcttaaaaagtcaaagtcatggagggggtggggtgtggggagagggagaaaaaggaatgagatgttggtcaaaaggtacaagtttcagttagagaggaggaataagtactgaagatcaattgtgcagcatggtgactagttaataatatcatacagttgtcccttggcatccatgagggattggttctaggacccttcctggataccaaaatataagaatgctcaagtctcttattaaaaatggcttagtttttgtacatcacctaagtatgttttcccatatactttaaatcatctttagattacttataatacttaatgcaatgtaaatgctatgtaaatagttgttatactgtattcttttaagctgtattatttttatgttgtattgttgtattttatcattttttccaaatattttcaatccatggttgactgaatcagaggatgcaaaacccacaaatacagggccagctgtattgtatatttgaaaattgctaagacagattttaaatattcataccacataaaaaaataagtatgtgaagtgatggatatgttaattagcttgatttaatcatttcatagtgtatacatatatcgaaatgtcaattgtaccttataagtactcaattatttgtaaattaaaaataatttaaattttttgaaatgtaacattcttaactttttcttgttcaaataaagttttctgttctttattttcaaaaacttttttgtttaaaaatatcatctcaatcatctcaatttctattaactcaattgattcaccctattaacttatgaactctcctctgaagttaaacattccatgattattgagaagggtaaagttaatgtgcagtaagatcttagcccacagtaaaaaacaaatcttagtgatgtcacttaataaagagacttaattccacagtttctccagtgactcaggttatatggagtttccaacgtctcatcgtgcatctacttgcaagttccattggctagtattagtcaaatgatcccaacctaacagcagaaaagactgggagatgtaaagaaccttatggcatattgacgagcaacattgtctctgaaagatatgctgatatttcctaaggtaaggacaaatgctaacaactggcaggttgttctctagaacacccacatactttcctccaagttatatgccgactaagactcaattcttcttgttagcaaacttatttataaaaaatgtacttgttactttaattatcaattaaagattatactacccaatgaaatctgggtgcaaaaaataattgtttctatgaaactgtcagtggaagaaagggaaaaagactttgatcctctcataaccaggatgtgttcagtgtgacaatgttgaactgaatgttctagaatctgtgttggactgcattaaatacggtcataggctgcatgcagcccgcgggctgagggttggaaaagcttgtctgccttaatgacaaacccagagactgacatgtagaccatcttcagggctgagcccacatcaaaggggtcacagtgtgtagtgacgtccctcataaccgggaagagggtgtcatcaggaatgaacaggttacgatgtcaatgacaaagggagctcagacaaggaatgagatggctgtgaacaggtacccccactgagggaccctagaaccagaggaagctctgccgtttgacctgtgtgctccacaagaaacaaacttcccctacaccactctactgtgaggaggctctggaggctgaggtgttccacatggctggtgtagacatctgcacactggaagtcatttccagcatcagaaggatctggaaaacccagtcctccttcctaataagagggatgagcatgctggctggcagcatcccgtgcacaggatggtgtgtttgggaggtgtgcatgttacccaggcttggacaatcagaatctttccccaaattattaaaactctggtagacacttcagaaacatatacaacaaagacagacacacacacacgcacgcacacacactcaaacgaagagagacatgagataaggtgtgaggtaataagaaagatgcagaaaataaagagatgcaaaaagaaaaagagaaagaaatgcagataaatagtgccaaaggattacaaaaatagagaaaggcaacaatgcagtgaaagagacacaagaagggaacaaagacaaaactggagagagacacacagaaagaactacacagggacaaagagacacacggagaggagaggaggatgcacagatggaactataacagaaagagaagagagagatgaagatctcatggaatatctggaactagtcacttctgaaaccaacattccttgtaacatgaatcaaatatctttgggttgggtgtctatcatttggaaccaaaaatagtactttcattcctggttatgctttcttaaaaataaaaattagccttgattgatgtgacttgccagccagaatatatttgaaacatcagtcactataattgtccccaaacaattccaccatgcttacttagacaacactcgccaaaccggaagagaggctgggatgtcctaaggccattgcactgaacatcaatattaaagaaccatgaatgatgtgatgactgaattgattttctacctcctctgcctacccttactttgcaccccaagatgctttcagtgtcttttcaaagtacaaccctctttctagccacggtttggctgggtcacctcaaggtatgttccttcacttggcagtggtttcctacctctgcttagttaaggaagttccgaacacagataactcagaatcaggtttaattatgggaaaaagcactaaagttaggtaaatgattttgtttgtcatgcttctcttgacaggtctgtggggggagaatggaaacagagatgccccttggggcctgagtagacacagcttgcagtgcacaggcagaggctctgggtcagtgcaggaagcagagtcaccgccagtgccttgggatggggatcacagaaggtgacctgtggctgcatgagccactgtaggactctgacctcagtgggacaggatgacacaggcagctaggaattctgggcaggggcaggtgggcattacagaagagtgatgaccaatcccagacaaaagtcctcaggagtcagtgcaggagtcctggagaagagagatgaggcatgatcagcacagggtaccctgagggacacaccctctcccccagtcctgagtttcctctgcagcatcaaacagaggatgctgaggtccagggcatatcatcatcacgttccccaatatctgtgtaaaggtaaaatcagctcatgaggacacagaacttcagcttgatgcagatatgtggaggtgggggaacagcagttacccttctgggtaatatgaagagtttgatttttttagtaaattgggtgacacttcatctccaccactagcagcctcttttagtcactgaaaatgcctacaggcagtagctaacaaaatgtggcacaaagtgggcatcaccctactatctcacattcaagatgtggctctgtccccacatttcacaaaaagatgccaccaaagttaaggcctggttctaggaaacaatctctggagattcgtagaaactggcaaacttctcccctaagtcttaaccctcatagcagcaaacaggccatgaacagagaccactgtgccctggaacactccgctcatgctcttcttttttttttttttgagacagactctagctctatcgcccagactggagtgcagtggcgccatcttggctcactgcaacctctgcctcctgggttcaagtgattctcttgcctcaacctcccaagtagccgggattacagatgcacaccaccacgtccagctaatttttgtatttttagtagagatgcggtttcaccatggctcttccctcttatgcctgtgccctctcccctgactggatcatggctgaaatattacctgcaggtggaggccctcgaggtcctacaaaaggaagttatacagagaaaggtcttgttaaacaaacaaccactatcttaccccaaaggaaaatgacacatgtagtttaattggggttatatcctcttccctcccgtgttctttaagtccttaagcaccctaagttaaaatcccccaaaacaaaggaaattgtcactagaagacaaggaggccgaggctctgaccctcttaatggaggaagcttttagaaaggagccagtgagacgatgatgaacggtaaggacgccctggaataagctctatcagtcagctctggcagcgctaccattcacccagtaaaatcagattccaatgcctcctccaatcttgtcctgtctcctcgcacttcctctcagggtaaggaggaaagagctacatctagagacagaacctctctgaatagagggtctgggtcacagcccatcttcccccatttcccccttgggttcctcacctttctgacccctgtgacggatgataaggcccagcccgaggaagatcagccccagcacgaagcctccaacaccacccagcatcttgctctgggcagattcagactgagcccctaaggagcagagcctgagtgtgagtgtttgtccccacaccccataatgtccttggtacaggaggtggagatgtcaggggacactagttctccagtctgaccaccctagggaagagaaagaccagccagtaggtctttggacacaataggtgggtgagggagaggaggaagcacacccctgcccctcaggacttcatccataaccttaaaccctaaggccccagtcaccagccctaagtcagtctctcatagctgtcagagctggttctggggctttagtagtgttgatatggtttgattctgtggccccacccaaatttcatgttcaattgtaattaacaatgttggaggtagagcctggtgggaggtgactggatcattagaccagattcttgtcaccatctcccttagtactgtcattacaatagtgagttctcatagatctggttatgtaaaactgcgtagcaccaaccccctctctctcatgctcctgcccctgccctgtgagacacctcactccctcttttccttctgccatgattaggagcttccatatgtctccccataagcagaagccactatgcttcccctacagcctcagaatcataagccaattaaacctcttctctttataaattacccattctcaggtatttctttatagtggagtgagaagagccaattaaacctcttttctttataaattactcagtctcagagatttctttgtagcagtacaagaatggactaacacaaatgtggaaagtgatctccctagtatctggaaagacaaagagatcaggattcatctgatgtgcttgccatgggcaacaggtgctctagtctcctgtgattcccagctcagtagtgatgtcagggacaagagatgggatgggaaggatcagcgggagctctgccctttgtcttgtggggcccacagtaaaaggaaaccagtttccccttacgccactccacggtgatggggctctggaggctggggtgctccacttggcaggtgtagatgtctccacgctggggagttatttccagcatcaccagaatctggaaggtccagtcaccattcctaatgagggaggtggacacaacaccggctgtctcctcctggtcattccgaaaccaccggactttgatctgggctggatagaaatctgtcactgagcagaccagcaggttgtggtggttgagggcctctgtcctggatggggagatggtcactgtgggctccactgagggcagtaacagacagggaaagatataggagtgagatgtgagaccacacagcacgcctgctgtgaggaaggtccctccttggaaccagaatagaaagatacctggagtccaagtcttggattaaggttccttcaacaaatataaatttgacaatcactgagaatccaaaaataaacaacaaaccctggttcctgcctttatagaacttgcaatctagtaacagagaccaaaaaattgaatgttatttcaaaagtttgtaatatttgaaggaaaagtaggcaggccttgaaaaaaactaacactgatcaaacatcatgtttgcccataactcaattcctttatcttctcagagcgctgctcatggtcaaaaatgacacacctttccctgcatattttatacatcttaacctttacctctctggccattttactgcatttcctttatttctttagtgtaaaattatagtaaatatttaatgtatgctttatttacttggtaatatgttctctcattttcctgctttttcttaatttccttttaaccctcaagatagtgtaattactagctgcctaccctactccatccccttgctattgagaattactttcttgttctgaaatcagacattatcatgtacgttctccataggaaatattctgagatccatgcagaggttggcctgggtgaatgtgcctgtaatgcaaacatatacatatagctgggatttgctgaggtcagcaggtagcaccccaattaaatggcactcatgagccattgtctggaaggaatcttggtttctgcttggacttgaacttttctttaggccctccttcctggagtctgactgaaataacagtcagctatgtggggacttacaagatttgttcatcttaaaagactgaaagtaaaaatagagggcacaaattcatgagaaaaatgatagaataacttttatagaaatagacttgaaatggcaaaaatataaataattgacagcattaggatgtgggtcagaagaaggcaaggaagttttgtgaacctgcatagataacactggggtcagactagggattgattaatcagtgaattttcaatgccttgaaagtatcattttgtcccattaacagtgaaaacaggcaggaatagacccattgctgcttcttgtcaaaattggctttaacaaggctttacttcccttaggctgtgtagacgagtattgaagaacataaaagaatgctgtgtatttgggggaggcttcaggtcctagtgcataactgtgggttgattacttaaagtgtttatcatgtaccaatattacgatatataaagtggcaatgctaatctctaatgcacaggtaactgtgctattaaatgacataacttagatggtgtttgctaaggcaattgtctagaaataagtgctcactaagtgggtaaaattgacgttcagaatgtttatgcccgaagtggatagtgatggggggagggagaaaatctactccaaaagcaacctgaaactatttttattcaataatttagtggcttcaatctatgtattccaaagcttctgctcttttcattgtgccatttgttcagcttttctaagaaattaaaactgccttataacaccattcaagcgttgtttttattttcagcaaacacctttttccccagactgcattcacaaaccttactaagatccaagtcaataagagtttacagcattaagcaaaataatagaaaataattgataaagtccatctttaaggctctatttatcctctgctttcccttgagcctaagtggatgggcagctgagtacatttattcattaatttaacagaagatcattgagctcataccacatgccggtccacgagtcaggtactaggcatgcaatgattaaaacactctcacctcaaagagctccgccatgaatgagagccgtttaagaaaacagaattacgatgaataataatttgaagccaaaagttaaaatatcttatttcacaactgtaattgctggatgccctgcgcgcagttgtggagcagccctaactccaccaggccaagcctgaagcttcctgcggcgcgagctgtgcaagtgggccttgctgggtggggcagtgctagtggggcggacgggcaggggaagagggcgggcattcgggcagaaagaactgcttagcgaaggtaaggcacgaggaggcaaacgcataaggcacaaggcaagaacatgcagagcagaggacaaggccgatggacggggaggctggggacacactgggcagcctaacccaaccctgcagggaactaagggatgcttttgtgcatccccctgctctgccctagatccccgcccctccgatactaccccagcctccaaatccccgctaccttcctgtaccctgggatgggtcagggctcggtccttgaggccgcgccgtcctcgcccctccgtgcgcaagagactcgggccccggccaagggtgagccccgcggaaggacgacgacgctcaccttgccgctgcaaggtcgtgcgcagctccgcctcgtagttgtgtctgcacaccttgtccaccgcggcccgctcctgctccaagaagtccttatagttgttccagtcctcgatgctccgccccagctcggtcaccgcctggaactccccaacgtcgctgtcgaagcgcccgtactcctcgcggttatagatgtatctggccacaccgcgcacgcgctctgtcccgttggtgaagtagcacatgcccttaaactggaccaagaaatcctctgcggagaatcacggcgggtcagtcaggccccagcacggccctagccccagcccccagccggaccgcacccttcagccgctgccctgacccggccagcagctgcgaaacccgtccacgcgaaattgagttcttggctgggcccgtgcctcgtgctccggacctgggatcctcgagacatctctgccccagccctgcccgccctctctgagggcctcgggaatctgccttcctttagggaggtaagagggaaagcccagtccctgcctgagcctgtgaaccaagtgaagagggcagtcggaccgattcgacattgacctctgctcttagatcagggcgttctcgtatgaaatcccattttccatggagctcttgggaatctcagagacagagttatccacataaatttgagagttcaagggaataacgagaaaggttcaggaattaagcttgttctcatcctgatgtaagtattctcttggtccctgggcaagagaccaagtaaacccatgcctggatttactctctttctgctatacccgcccaagtgccctgtgaggttcactcacttctgtgttagaaaggacctacacctccggagtcctagaaggaaacatttattcatggaaagagcccaagcttttgaattctatagggtccaattaaactgagtcaatcaccagcttgggcaggttacttaacagaatatccatatcacaagtataattacataaaaggaaaatcatgatacctacacataggatgttaggaggagtgagagaggatttatagaaagtactgtcctgtgtctgaatggagtggtttctcaatatgtattatttcccttctttacttcctccttcctatcatactaaattcagtccaccatcaactcaggtccctgaatcccactcaagtcaccttttgcccataaatcagtgaaacccaaagtaagactccctgtctgtggtcatccagtcaccttccctcagtactaagagtttgcctccacaaactctccactcgagtcagtagtatagactcctttacctccaatacagagactacagacaccattgctgccttacattttcccagtgcagaaaaatcctactgtgtctttggggaaatgcatatctttggggaaatgcataaccgtggagtgccatggtcattttgtcctgtcacaggtagtgaatgcacactttgtctcctctttcctctctcctccttcaggcttaaacctgtgggattggggttggattatcctcacctcacccattataaggtggaaataaaaatgcaacatagctctatttcccaaaaagaataaatggtgataaaagactgtgttctgagatcatggagatcaccatcccccatactccaacccaaggagagcctgttcccacagtggtggctctcgagagcagctgccctgcacttactgggaaagtctctggcctcagccactggggtgctcagcatcaccagcatcacggtcacagctgctgcccaaaagcctccagggatctgcagagccatcttccaagacataagtgagaccaaggaaaaagcagtggtagtcaacacagctcaaacctaatggatcttatgtacctgccggaaagaataaaaacctctggatgtttccatgtgtggtaggattggggagtccctaggaaaggaaccaatcagcactggagctgaaggacctcatctgcctctgggcagacatttttctgtgaagattctcactccaatgcctggcactgtttcttcttcaaattgcactagatgaacatttgaggtgaagatttctgaatagctgaagattgaatggcttaggggttttaagaagcaaaagacaaatgtgattcaagagtagacatcttacaacctattgttcttatacttgggagttttagtagggcaaattaagtgaggatcatatttcagggaacagaaaattgtcacagaaatgttcacttctattagacactctgaggagccttaagttttggtgagaagagcaaagttcttagaaggaaatgatggtgagttgcagttctaccactaatgtgctttatgagagtcaacaaattactgaactccttttcacccccaggcttctctttgcaaaatgtggatcatgttttatgcattttacatctagatcttcacatatacaaatttaacattaatatgactagtttaatattacaaaagcctcctccactgttatgtgtaactatcaagctaataggaggaacaagaaaaaaaaaagttgacacccagccctactggcaagtgattctttattatgcaagaaggtattgcattcatgctcttcgagtgaaagtatttgttgacttttctcttgtaagttcttcagctgcttaaatcctccctgaaccatgaaacaggtgcatctgatatgagcaaaggcacaatacacaaattttacagtattcagacacagtcacatttagttttgaagatagagaacaaaagctgtgaagaagaatttcctgggggctgaatcgtattaatgatggagcaaatgtttagagttacaggtcatattgggccagccctaaacatcaaatccaaaatggcagaggtaccaatgtgtttttataaataaatttcttacttatcaggcttacgttgcccatggctagggatagtactaatggttataaagcaattaaaacaatgcctgacaaacattactggtaatcctaaccaagacaataaatatctccacctctcttcttgtctcccttcctcccactcttccctgtatattagtaaagtagaagatagagagcatctaaaagcagaatatgtttaccaggtaaaaagaaacagggaagagacggtagcaagaggtttgcaatagtggcacatgaaagcattgagccactctaatattctgtattattctgtgcatagatttagatcacctgagactgggaacgttgttactgggcttctagcagcagtggtgtactcaggatcagggtaacccccagtctaaggagggtctccactggtgcgatggaagcataaaggaggaacatcaaactcagacctagaacggaactgggggcaagaaagaataggcagagagggacctgaagatgccctcaatgtcctctcagtccccacctcagcgtccctcggaatagaggcctctggcccaccccttcttcctgttcaaagggagaaacttccctcaggtttattctggggctgtgaggcaaagtctacgtcaaacctagggactccccagtctcatgggcctcttcaaacagacttttttcttttcttttcctttttttttattttccttttttcttttcttttcttttttagggacagggtctggctctatcacctaggctggagtacactggcatgatcatggcacactgcagcctcaacctcttaggctcaagtgatcctcctgtctgagcctcccaagtagctgggagtacaggcacacaccgccattctgtctaatttttaaaaaaatttttatagaaatagggttttgctatgttgcccaggttggtttcaatgtcctggcctcaagcaatcctcccacctcggcctcccaaagcactgggattataggtgtgagccaccacacctggccacacagacttttcaactagcaacgaaagtgtcagcttagagccattttctgactggctaaaacctcatctgaggccaggcgcagtggctcacccctgtaattttctagcgcttcaggaggccaaggcaggcagatcacttgaggtcaggaatttgagaccagcctggccaacatggtgaaacccgtctctaccaaaaataaaaaaaattagccgagtgtggtggtgcatgcctgtaatctcaattactcagtaggctgaggcaggcgaatcgcttgaacccaggaggcagaggttgcagtgagctgagttcgcaccattgcactccattgcactccagcctgggggacaagaacaaaactctgtctcaaaacaaaacaacaacaaaaaaaaaacacctaatctaaaaggctttggtttggggcttctgccagttgtgtccccctgatccagccttctctacagttctttgcaatgttcctatccctgctccattactcagggcagccactattggcctggccagaggaaggcaactcagacaagcatcctgattctgaatgcctcacccaaatcacctgcccggcctctgatggggacagagcgcttaggatgagaccacacacaccccatgtgggaagatgggataaagacactgctgttattacgggtcaaggttacactagggagactccccagggcacattgtctcttctttcagggcagaaaaaggttgtggactccttctttgtggaatcaagggagaaatcatcttccctggtcagcatctcttagaatctgtgcttggtcagtgcagttgaatgtaaacacaggagtcatcctgtcaccagaagggttatccaggactctgtcctgcaattacttccagaatcaagaaacactgtagagtcagaaaggttctgtggcctccttaatgccagtggtaacagaaatacagccccagaatatcattttcctttaataaaaatttatcaagtaattatctccaaatttttcaaaaccttgtgaagctacttacatatttctcttatatcaacttttaggtaaccggttacatgaatttttcatgacacatataaggtaggccttttctctttaaacagttatctctttaaaatgacaatttagaaaatctgaagagagagtctgtagcattcagaggctgtgctcaaacagtgcctccttcaagcaagtaaccatggggagactccatagtggaagtcaggtaaggacttggaggataccgcagggtgaaggactaggagtatgggaaaagctttagcaggaagatagaaaatcagatgatacaaggcatttgggacacttgggggaaatggggaaggtgagtgatctctggcacaggagtccagagcccaccagtctcatggcttctcatgcagtatggaaatggcccttgaaaacagaagaagactgggatgaaaacccaggctgcctgctatggacgtgtgtacaacggagctttgtttcctgatctgtttctacaggtttcttcttccagtcaatctcatccatgcatcacctcagctggaccactgacgatttcatcacccagagctaacctacacatgtcactctttgcaacatatctgttcgtctctacttctggttccctagtaatgcctgggatatttccagagacaactcttccccagcttctagatttgtagtcatcatgtgccttcattcccagacaaaccttaaatatctttctatgagatctttataatgtcttcttctacaagttcttaccagtagagagaagaactaatattcaggtatgtaaaaaatatttcagtcctatttaagctcatgtccaagtactcaagaattcaagtgtccagctcagctcaaggtcatggttcatgcaaaaaagcaacattagtagtaatattttggggggactactcatatcctcaaataggaaaacttaagatattcaatttaaacctcaatgacatatcaatccatgcttttcaggatgactattatcaaaaagacaaaaaataacaagtgttaacaaggacgtggagataagggaacatttgcacactgttggtgggaatgtaaattagtatggccactagggaaaacattatgaaggttcttcaaaaagttaaaatagaactgccatatgatgtagcaatcccacttccaggatacagacaaaggattttaaatcagtaggttgaaaatatatccacactcccatgttcattgcagcattatgcacaatagtcaaggtatgaaatcaacctgtgtcattcagcagatgaatgggtaaagataatgtatgtatacacaatggaattctattcaggctttaaaaagaaagaaatcctggtgtaagccgaaaagtgactgaggcaggtctcaatcaattagaggtttattttgccaaggttcaggatgcacctgggaaaaacacgaatcacaggagcatctgtgatcaatgcttattccaaagagggttttgagaacttcaatgtttaaaaagaaagagtaagcaggaagggaaagagagaggaaaaaaaaaaaaaaaaggagggaaggtaggcaatgacacaagtggttacattcttgtgagtctgattagcctcagtaaatctacattttacatgtgaaaagagggagtagaggaaaaagtcacttatgcaaaaacaataacattgtagaatcttcccaaaagattcattttctattctcacagaccgacaattccactcaagttaatttctgcaaaagcatcctaactggtcttcctgcctctactttataatgtcaacattgctcataaatccaagttaatctctctgagtatgagtttctttaactgcaaaatgagaatattatctattccatagagtaatgccaaggattaaatgaagtggcaaatatatagcatctaaaatagtttgaacacatagtagatgctcaataataattttttaattttaatataatttaattcaatagcttttaggttacaagtggttttttgttatatggatgaattgtatagtggtgaagcctggaattttagtgaacctgttacctgagtagtgtgcattgtactcaatatgtagttttttatccttcaccctccttcccatcctccccaatttcttactctccattgtcctttataccattctgtatgcctttgagtacccatagcttagtacccacttagctcctacttacaaatcaaaacatatggtatttagttttccatgcctcaattagaagttgtaaattttgatggagtccaatttatatatatttttttcatttcttgcctatgccctcggtgttatatccaagaaatcattgcctaatcaaatatcatgaagattttccctattttttttctaagagttttatggttttagttttcacatttaggtctttgattcattttgagttcattttgtctataatgtagggtaagagtccagtttcattcttttgtatgtggacttccagttttcccagcaccattgttgaaaaggctgtcctttccgcatttaatggccctggcactcctgttgaaaatcgtttgactatatatgtcaggataatttcctggttttgatattgcactttagttatgtaagatgttacaattggggaaaactggatgaaggctatacagaatctttttgttctatcttggtaactccctttgaatctacaattatttcaaaatataatgttaaaaaagcaaagccaaccgaaataatgtgtttatcttttaacaaactaattcaataagatacctaataaaaattacccaatgtgaaatacaaagagaaaagaagagcaggggaaaaacaaaacagagcatccaagagctgcagtgctgtattgaatggttacatcacctttgtttgtttgtttgtttgtttgtttgttttgagacagggtgtcactctgttgcccaggctggaatgcagtggtgcgatcacagctcacttcatcccccaccctcgcccccaactcaggcagtcctcccgtcttagcctcttgagtagctgggaataccagcaccatgcttgcccacttaatttttctctctttgtagacaaggtctccttatgttgcccaggctgctctttaggttcaagcattcctcccacctcagcctcccaaagtgctgagattacagatgtgaaacattgtgccaggcttatttttttaatgtacttttactctctttctctctttgtgtttcactctgggtaatttttattgatctatttcaaactcactgattcttcccagggctgtaccacatttgctgatgagcttgtcaaatgcattctttatttttgttaatttatttttattttatttccatttcattcatccttaaagctttcatatctctgctgaaactgtctaatcttgcatgttgtctaccttttccattagagattttagtatattaatcacagtttatgaagcaggtttactaattaccaataccaagggaggaaagggaggacttccactgcatggagaatagaaaagatcatcactatgccaaccaccaggaaaagaggtccagatacttcttcccactgcattctgagctactgtttatgtccaccatgcactggctacctgtttatctgagtctggtgaaacagaacacactcacacacaaattatgtgaagcagttttattacttacagatcagtagcaagggacagaagaagcctcagctccattgtgagtcagtctcctaaagctcaagaaagctgcccaggagagatgaagtcttaaccgcaccaattactctattatagcctaaagtgtaagtcacagctcaaactcttgatcacttcattcatattacatgttccaaaaaacaaccacaggaaaacttctccaacagtaactttgcatgaactcatgtgttctgtcaatcgagaaaaatggcaagtctcaatcattttaggaggtttatttgccaaagttaagaataagcacccaggagacaggtctatacctttctccgaagataattttgagggctctaaatttaaggggaaagggtagggatattgagaagtacacaattttcatgtaagaggagggtaaggaaaaatagtcattcatgcctttgtctggctcagttaatctgcattttttttacataagatgacatagacaaaacgggggaaggggaacaattagatatgcgtttgtggccgggcgcggtggctcatgcctgtaatcctagcatttggggatgctgaggcaggcagatcacttggggtcaggagtttgaaacaggcctggccaacatggtgaaaccctgtctctactaaaagtacaaaaaaaaaaaattagccaggcatggtggcagatgcctgtaatctcagctacttgggaggctgaggcaggagaatcacttgaacccgggaggtggaggttgcagtgagccaagatcgcgccactgcactccagccagcatgacaaagcgagactccgtctcaaaaaaaaaaaaagaaaaaaaaaaaagatatgcatttgtgtcttctgggcaggggcgtgactacacctgtaaagataagctaccaatttacattgccatggtaaaattttaacagaaacaccttagagtaaagatcttgcagctcacaaggactttccttgtggacaaaatatgagggaggcatgtagcttttcattttgtagccatcttatttaggaaccaaaaagggggaggcgggttttcgcaaccccgttcccagattaacttttcccttaggcttaatgagttggagtcccaagatttaatttcctttcatagttctaaaactatgaccaagtgttcatttcttcctgataggcacttagcacactgaccatgtgccttaaattgaccatatgatgcgaagagctataaatccatggagtcgtaagtttggggataccaaccacaatccatctgcagcagaagtggttcctttggaaccaagcttgaacaggtctaaaaactaggttgttcttctggtttagtgacagagactactatcccagatgaaaatacaatagtcttttagtgcttctatgcatggtcatgtctgtcagtagacactaaaacaatcataattcaagaacagagtaaatagtaacatagacccttctggaatagttgtctctgtcaccaaaacagaaaaacaaactagactaaattcagaggatgaggggaatcaagaatggcttgtgaaggagggaaacaaatattagttacagtcataatgacaactataatagtagacactgtagcaaatttcactaactttcttgccttaatcttctagatcacaattgatcactcttgtacctcccttcttgaggaaaaattaaaatgtgttaattttctcaggaaaaaaaatgaaaggcaccatattggactatgggagcttggaattctgaatcaccacctggagaaaagtgactcacaaatcttcaatatcctccttctgctacattagtgagttataaacttctactatatttcagccacaatacacattttagtctatttgttgcagcagtttggcctattctaattagtataaaaagaagaaaaaataatcatagaaaaaaattaaatgaagaatataacaattttaatagtttctcctgacttagactcacctgaaatgatcctcattctttgttttaggattagcagagatgtaagacagaatttcatgaaaatattcaacctggtggatgatgccaaattagcagttagcgtgtgtgcctggaattcaaaccatacaaatcctccctgcccacctctcatcctatcctttagagcagagcctgtttctcatatattgcccccaagtctatatcaatcaaattaatttttattatcctgaaaacacctatagaaagactaacatgttgaaagttatatttaaatatgggcactctgcttcatactcttttgccaatattacttcaaaactgtacaaacctatattctttgcatttgtgagaaattattatattgtagataaggctaaaatattttgtgaatcaaaacatactataaaaagttggaaagaaagacttcatttggatgtaaatacatgaaaatagcagcccagacactcaagacaagaggaataataactaagtgaccacaaaggaaattttttatcacatgcctggctgttccagacagggaagcttgctttacctgaaggaagtggtcactagaccagaatgtaaccaaatacaggattctgctttaaaaaaaaaaaaaaaaaagattcacaaaagtcacgttcaagttaaaccattaaatactttcttctccaactaatgagaagatgtggggcctcattaattctctctggcagattaggtcaatgaatccattccagaaaaaaaattattgaaaagagcaataaatatacaaaatatcaaagcagtcatgtgtgcaatccacagaaaagaatagaaatttacttaaggacagaaagaagtttagtaaacaatgataccactttcttggacagggcaatttgtgtcacttttccagacaaaatacatggatttggtgatgctttaatctaaatagtaataagacagttttattaacaaaatgtttctaactttcaagagcggtatacaaaaacaactattgataaaaataaggagaggtactctaatagatgtttacaaatgattataaagctaaacaattaaaacatgttcatagtgccccaaaaaaaggacaactgtggaatgatattggctgcacataaacagaacctaatttatgccacaattaatgaaattgaaaattttgtttacaatagccccctcttatccatgggagatatgttgcaaggcaccccaaaggatgcctgaaggcatgtaccaaactctgtatatgctatgtttttctacacatacaaacatatgatatagtttaatttacaaattgtgcagtcataggttaacaacaataactaataataaaatagaacaattataacaatatactgtaataaaagttatgtaaatgagatctctctctctctttctctgtctctttctctctcccctcttctcaaaatatcttattgtactaaacacctatattttcacactgtgattgattgaccaccagtaactgaaactgtggaaagtgaaaccatcgataagggaggaccactgtattacatttctaggaagtcgcaaaccctttgagaaaattttgggatgggagacaaacatatttctaagaagccttcaatgttacaggttatattcttcacttcttcaaagtacataagggcccactctactcttctggagtctatccaaatttgtagggtaatgggctgtagctaatgaggaatggaactcagtgggatgtaaggggtccggaaacaagttttttgaaatatacttgattgtcatgacaccaatatggaatgaaagagaaagcagcatagtgatgaggaaattatggtgagatttttaggacaagaagctattttaaaagaattttaaatcatttttcttggtgttagaaatacaatcctaatttgatatttttcaagaggttgcaatataatttgaagtatttgaaatggagtatggggaaatttgctctggcctctctaaagaacatcatactgggactgctttcaaggatagaacaagttatcctgcatttatgttggataaattaagaatgtagtgcataataaagcaaacttttaatccagtggaataggaaaaattactaaaaatagtgttgggtcaattagtgagttagtgggatagtaaaaagagcccatacatacacacatacagagattatactgaggcagattaaaagtttaaatgagaaggaactcagaactgaggaggaaccacccagaacatgcttgctagtaacacatcttcccacccccttatgaataatcatgtaagactcccataaagggagtttccccagtaacattcaacactgtctcacccgcacaagcaacctgccctgaattgtctcttggggtgtactgttgattctgcacctaactttcagagtatcctttctcctttgcaagaaattgctctatgttgtatctcctttgctgtgtgtctgttgtttaaattcttttaaactaagaagacaagaaccgaagtttcatgaaagccatcaacaaaaatatagaaaaaaaaagtaaatatttattttattaaaaagtggtgagatgagtttaaataacaaaacaaagaaagaaaccgtacaggaaagtattcttagactatactaagaaaaagtaaagaattaatatgtgaaaggtatatcaattttaagcattctgtttatgtcaaaggtgcttatggtgcagtatgtaaaatttaaataaacaaagcatattgtattaattttctagccactgtcataacaaattagtagaaactttgcagcttaaaacaacacccatttattatctcagttttctaggtcagaagtctaggcaaagctcaactgggctctctgcttaggatctcacaagactgaagtcacaagctgaccttataattctcatttgaatatggagtcctcttccaagctcactgcctgttgacagaatttatttccacgtatgactgaggtccatgttttcaagccggctatcagccagggatcagtatcagctcccagtgaccactctcagttccttgccacatggccctctacatcttcaaagtcagtaatacagagtctttctcatgtttaatctccctcttcaagaaaagttcagtccctttcaagggctcacctaattagttcatgctcacctacaataatttccttttcataaggctaattgcagtcaaaacataacccaatcacagtagtgatcataccattaaatttactggttactattgggagcaagccccccaaaatctggccataaactggccccaaatttatggcccagtttatggccataaactggccataaataaaatctctgcagcactgtaacatgtccataatggccttaacgcccaagctggaaggttgtgggtttacgggaatgagggcaaggaacacctggcctgcccaaggcagaaaaccacttaaaggcattcttaagccacaaacaaaagcatgagcaatctatgtcttaagagcatgttcctgctgcaattaattcagcccatcccttcgtttcccataggaatacttttagttaatttaatatctatagaaacaatgctaatgactggtttgctattaataaatatgtgagtaaatctctgttcagggctctcagctctgaaggctgtgagatccctgatttcccacttcacacctctacatttctgtgtgtgtgtctttaattcctctagcgctgctgggttagggtctccctgacgaagctggtctcggtaggttccacccacatttaaaggaaaataattttataaggtatgtacaacagggggtgatagatattcctgggggccatcttagaattctgctttccttctcacctcttcagccctctggccacctgtaattcatgtccctctcaaatgtaaaatacattaatcccttctcaagggccccccaaagtctcattccattacagcctcagatcaaggccaatatcctgtctaaatcttgttagctcaaagtccaaattcgcagtgccttcataccaaattacaggacttgaagatgtgagaattaggaacttgacagaatatctaattataattgctaacagtcatgagattagtttattaattaaaatctcacctgggaaccaagtgtataaatgtcattgaatccctggggatagagacagggaagcacagggatctgatgatatttatagtcacttaacaaaaaagactaggtggtatttttttcacccacacctagctttgctggcattgagaagacacacctaagagaataattaatcatacctacaggaccccttcttcactgagacagaatagcaatgaagtcattgttattggtgtcatctgcactctacttatttatacttcatatacttacatagtatataccagaacacttaaattaatttcatctccaattactgtatattattattattttttttgagacagagtcttactccattgcccaggctggagtgcagtggcacaatcttggctcactctgcaacttccatctcctgggttgaagcgattctcctgcctcagcctcctgagtagctgggattacaggcatgtaccaccacacccggctaatttttgtatttttagtagagacagggtttccccatgttggccaggctggtctcaaactcctgaactcaggtaatccgcctgcctcggcctcccaaagtgctgggattattttgtattctagatgtcgattttgctgtgttaattaatttcctgatgattgcaatagaatacctgaaactgggtaatttataaagaatcaaaatttatttctggaggctgggaagtccaagagcatggtgccagcatctggtgagagcctccttgctagtggggaccctctgcagagtcccattgtggtgcaaggcatcacatagcaagcaggctgagagggctacctcaagtatctctttctcctcttatcaaacccttagtaacccatcaccccatcctcatgacctcatctaatactaattacttctcacatctcccacccctaaaatatcatggtctgttttcttacccttttatactgttacaatagggattaagtttctacataagatttagaggagcaaactttcaaaccatagcatttcacccctgcagcctcaaaactcatattcttctcacattcaaatacattcattttatctccagagccccaaagtcttaactttctctagtaccaactcaaaagtccaaaagtccaaagtccttatctgtgagcctgagatactaaagccaattatctacctccaagatacaatgctgggacaggagaaatgggccagaagaaagaagtaacaggcctcaaggaagtctgaaactcaacagggaaagacattaaattttaaagctggaaataatgtcttttgactccatgttcctcatcctgagcacacaggggcagaagttgggcccccaagacctcaggcaaccctgccctcatggctttgctggttgcagcccatatatggctgttctcatgggttggagtcaggtgccttgggttttcgaagctgggactgcatgctggtagctctacagttttggagtcttggtggcagtcccactgtcacagcaccactagatatttccctggggaggactccctgtagcagttccaaccccacagttcctctcagcattgccctagcagaggctcttggtggttgaaggggtgggtcgcccctccacacctgtgggtgtttctcgttaggtggaacgagagacttggaaaagaaaaagacacagagacaaagtatagagaaagaaataaggggacccaggggaccagcgttcagcatatggaggatcccgccggcttctgagttcccttcatatttattgatcattcgtgggtgtttctcagagagggggatgtgtcagggtcacaagacaatagtggggagagggtcagcagacaaacacgtgaacaaaggtctttgcatcatagacaaggtaaagaatcaagtgctgtgctctagatatgcatacacataaacatctcaatgctttacaaagcagtattgctgcctgcatgtctcacctccagtcttaaggcggtttttccctatctcagtagatggaacgtacaatcgggttttataccgagacattccattgcccagggatgggcaggagacagatgccttcctcttgtctcaactgcaagaggcatgtcttcctcttatactaatcctcctcagcacagaccctttacgggtgtcgggctgggggacggtcaggtctttcccttcccacgaggccatatttcagactatcccatggggagaaaccttggacaatacctggctttcctaggcagaggtccctgcagccttccgcagtgtttgtgtccctgggtacttgagattagggagtggtgatgactcttaaggagcatgctgccttcaagcatctgtttaacaaagcacatcttgcacaacccttaatccatttaaccctgagttcgacacagcacatgtttcagagagcacggtgttgggggtaaggtcatagattaacagcatctcaaggcagaagaatttttcttagtgcagaacaaaatggagtctcctatgtctacttctttctacacagacacagtaacaatctgatccctcttgcttttccccacagtggtggccctgcccctgtggcagttttctccttgggttcccaggcagtctgatacatcctttgaaatctaggtggagatttctatgccttcccactagtcttgcattctgaagacctgcagaaatagcaccacatgcatgtggacattgccaaggcttactgcttgtgccttctgcagctacaatatgagtcacatctggggccacttgagctatggctggagcaaccaggatgagggaagcactgccctgaggtggcattgggcagcaagcccatggaggacaccccaggcctgtctcctgaaaccattctttcctcctagagctctgggcctgtgatggcaggggtagacttgaagatctctaaagtgcattcagtgtttgtctcccattgtcttgatgaatagcttctggctttattctattcatacaattctccttatcaatcagtccctccttaacaatcattccttcagacacacccttggtttcctctgttgaaaatgctctttcagggccaggctgcaaaatttcctaatctttccacttagcttcccttttaattataaattccacctttaagttattttttacctctcacagctttaatgtaagcagttaaaagtagccatgcagctgcctgactgctttgctgcttagatatttcttctgccatatagcctaataaaaccatcagatatagacacaattcagagccaagtttttcacccatttattacaaggatggcctttactccagtttccaattccttgttcctcagacctgagacctcagcagaacagcccttactgtccatatttctattgacattctggtcctgaccactcaaatcatcacaaaggagttccagacttttcctagtcttcttgacttcttctaagccctcaccaaaatcaccctttatcaccagaattgacatttaaggcaatacaggctttttctcgcctgcctttttgagttcttttaacctctacccattacccagttccacagctgcttccacattttcagatatttgttattagcaacagcccaactttttagtaccaattttctgccttagtctgtttcttgttgcttgtaacagaatgccaaaaattgggtaatttatgaagaaacaaaatgtatctcttatgattctggaggatgagaagtcccagagcatggtgccagcatctggtgagagtcttcttattggtgggccctctgctgagttctgatgaggtgcagagcatcatgtgacaagagggcaaaggggtatggctcaaggtctctgtttctcctctcaatgccccaccctcaagacctcatctaatcctaattacttcccaaaggtgccacctctcaaataccatagttggatttacagccctcttaatactattactatggggattaagtttcaatatgagtttcagagaaaataaacattcaaaccatagcattgcccatctcttttactctcctccctcctcttcttttctgtactccactgtccctgtccagaggttttatttagccactccacctcagcccatcaggcttccaatcaaaatcccagttcttcagtgatcattcagatttattgtcctgttgtaatatctggaacaataacaatcttctcaggacagttgttttttatttgcttcagttccttttgagaaagttattctgtgtcttctcacttccttatatctatagcatacaagtgtttgaaaacattctcctcaacctcctttaaaatcatggggagcccaacctcagctcctagccagaagcagaaagtcaaaatttggctgtctttcctccatagagcacttttggtttctttcccacttaggaattaaattcccagccaataatgcctactttcaggcatagaagtcaagacttcagccctactcaccatatgcatatctatcttatttgaagttctcaggaagaacttttgtatctacactcatactttttaatcctttttagtacattgcttcatatagctttcttggtggtggttgtacttattacaatatatacatataacttatcacagtctactggtattgatgttttaccactttgagtgaaggatacagtccgtatctctagtaccattagcatattttaccctctctactttttaaatgcaattgtattaagtatttcttccacatgcattcccatccacagtttggatatttgtccactccaaatctcatgttgaaatttgatccccaatgttggaggcagggcctaatgggagatgtttagaccatgggggcagatccctcatgaatggctttgtgctaatgtcatgatcctaatgcttgttttattcctcaatgtcatcattgattcaaccatagcttttatttttaatttgctttttgtttgtttgttttctttttttttttttttttttttttgagacggagtttcgctctgtcgcccaggctggagcgcagtggcgcgatctcggctcactgcaagctccgcctcccgggttcacgccattctcctgcctcagcctcccgagtagctgggactacaggcgggcaccaccatgcccggctaattttttgtatttttagtagagacggggtttcactgtgtcagccaggatagtctcgatctcctgacctcgtgatccgcccgtctcggcctcccaaagtgctgggattacaggcgtgagccaccgtgcccggcctgttttcttttcttaactattattttaagttcggggtacatgtgcagttttgttacataggtaacctgtgtcatggaggtttgttgtacagattattttgtcaaacagttattaagcctagtacttattagttatttttcctgatcctctccctcttcccactctccaccctctgataggccccagtgtgtgttgttttcctttatgaattcatgtgttctcataatttagctcctatttataagtgaggacatacagtattcagttttctgttcccccattagtttgctagggataatgactttcagcttcatccatgtctctgcaaaggacatgattttgtttctttatggctgcatagtattccatggtgtatatgtaccacattttatttatctagtctatcattgatgggcatttaggttgattccatgtctttgctattgtgaatatgctgcaatgaacatatacatgcatgtgcctttataacagaaagatttatattcctttgggtatatacccagtaataagattgctgggttgaatggtatttctgtctttaggtctttgaagaatctccacactgtcttccccaatgatgaacaaaacctctgagaaatatggggttatgtaaagacaccacatctatgactgattggtgtccctgaaagagatggagagaatggaaccaacttggaaaacatagttcaggatatcatccatgagaacttccccaatctagctagagaggccaacattcaaattcaggaaatgtagagaaccccaataagatacttcacaagacttttatccccaagacacacaattatcagcttccccaaggtcaaaatgaaagaaaaaatgttaaaaaataaaaaataaaaacaactagagagaaagatcaggtcacctacaaagggaagtccatcagactaacagcagacctctcagctaaaaccctacaagcagaagagattggaggccaatattcaatattcataaagaaaagaaattccaactcagagtttcataattggccaaatgaagcctcatattgaaggagaaataagatccttttcagacaggcaaatgctgagcaaattcattaccaccaaacctaccttacaagagcttctgaaggaagcactaaatatgaaaaggaaagactgttaccagccactacaaaaacactataaagcaaccacataaacaagtctgcaaattaaccagctaacatcatgatgacaggagtaaatccacacatatcaatactaaccttaaatgtaaatgggctaaataccccaattaaaagacacagagtgacaagctggataaagaaccaagatgtattggtatgctgtcttcaagagactcatctcacatgcaatgacacacaggctcaaaataaagagatgaagaaaaatctacaatgccttttttccttaaaatttgttttttacattaataaattgatatcatttttcaaaattagtatttgcatgatatatcctttctgtcttttacactcaatctctgaaatgacttttatgctttagacatatgtcttgtaaacagtataatctgaatttgtatttttgcattcaatttgtcaatctctgtcttttgatcacaagtcaagtctatttgcattttactgaaataaataacatatatggacctttatattatctcacatttttcatttcggtcttttccatgatttcaatgacttttttcctgttagcccatttctataacccattctagcatgtgtatcaggctgggatggcaggtggattcattctaacctctaccttgagatgtgttttcagactctgttaaggtttacgttgctcatttctggcatccttcacataagaattactgatccaggcccagccatttgtagattttgagacattgttctggctgtctgcatatggcctgtctctggacttaacatcccatgtcctcactcagactacataactttagacccaccctattactatggactccctgtctatttgtattttttcagcaaaacgtctaaaagtaattatcaatattcttgaaacattaacttgatagattcttgtaaaatcacataatctattgaaaattatatgggtgctctaaactataccccctggataatcttacctgtacacagtttgaatagatgtcctttacagctagaataatgatactagttaaaatcagaggactaatccatgggtagatcatttcaaaatttactctgaggcttaaaaggaaatatattttgtaaagcaagaaagtatattttccaagatccaattagcaatgaaggcatcctaatagtatctgggatcctcacatgtgaaaaaaataaactagattacaaaagagaggacttacatacacttagttcttgcaggaggaaaggaactatctagacgttgttattttgttcaaaataacgtataagtacaaaaatctgtggtagtaaatctagtgcactattcttacatgtgacactaataacccaaggaaacaataataaaaatatttctgcttcttttgaaatgagcctgtcatggcctgcatggaagttcactactgataagcactttgtttctttattcccttactcagctttcctcttttgtagcttcatagcaagaatcacaacctaacactgcattttatgtctgtttattatgtgactttttttagttcctgctagaattaaagctcataaaggtagggacacatttgcctttttgactaggttatctggaatagcatgtagcacttagtaggagctaaataattatttgacaaataaatggatacattcattgatgaatttgatgtccacataaaggctatctttatttaaataaacccgttatttccatgagtcacttgctcctcctgctacatgtagagaactatcattcaggatttcagttgagttctaaacagttggatacttccacaatcagggatcttcaattcctccacttggcgttttattcaacagaagtgcctttggacattcacacttgatcttccaaaaccacatcagcttctagaacaatgcttctagacagtttcttagtaacccctcaaagacgtgatttcacatttttatcaatgtataattttatttaaactgaaatgacataatattactgtgtcaaatattatagagaaagttggccatctttgcatatgctgttttccatttgagtttcttctgtgaattactgttcatctactttccaatatttcaactaggttatttaatccattgatttgagcagtactttatttcttcctttgtgtaatatatgtattgaaaaatatccaaatatacttcataactatgttgcccaaattttgtaatgcatactaacaaatatctacctgttatattcatttttaagaaatatactaaaatgtaataacttgtacttttcccatcccactttgcttttctaagcagtatttatgtatttcaactttttttacagtttaaatacaatatacttaggtgtaggttttctttgttttttttttaaatacagggattacctacagaggaactaaacatagtaatataataaaattgcaagaaggatgccagagacataaaattgttggtggtctaaattatctgctttcagataattagataactgatgtctaaattaataccccacatacacaaagatacacatattaccattaaaagtcattgacctggggataatgctagtggaggaaaggaatggcatgaagggctcttgttttcattaaaatacatctttattgtttaatcctcaaactatatacaggtatcctgataaatttaaaatactgattgcaaaataaaatttaattcttactgaaatatcaagaatgctgcagatggtggcaggatgctcaatgtgaaaaaggatagtggcttgcattagaatgacagcagcgaagtttgttttaagcatgtaattttatagtaccaatctcttatctgtgaaagcgtgtaaaagactgagctcttcagttctcaaacaaaagcagactttaactcctgctccagtcatgcttctttgcttctcaaacacccataaccacatctcagattgcatcatattttgaacacatggaaggaagagtaagggaaaaaagagtggctgggttaccaccctcaagaaatgctgatccctcaaatctagacctgccaaggggccaggagagaagggaaagcagcagctcccttgaatttttaaagtgcaatgtccccacctactggtgaagatgacccagttaacatccctacagctgtcaatgtcttcctaggacattgacttcttctagtagaatcagtgtgcttcagctcagttttacaccagaagataaacaaaatataaatccaagatttttgcagtgcagtggaggtctctgagggtgttgcaatgagaattttaaacacaaagctagttttaaaataacaccataattagcagtccctttccccagcatctatctactcctcacagcttctgctcagattgtcttctctccattgtctcttccatcgccctgtacaaatctcctctcttacactgcatttcctgcccacaccctgcttccccatgcgttaagttagcagccttttttccctcttgttgttttctgccttctgatatttcagataagaaatctgtttctgggccgggtgcggtggctcatgcctgtaatcccagcactttgggaggccaaggcgggtggatcacctgaggtcaggagttcgagaccagactggccaacatcgtgaaaccccgtctctactaaaaatacaaaaattattcattggtcatctacttggtgtccagcactaggttattcctaagtatcactgaactttgtgataacgctgaagatatgtttggaagtttcaggaaccagaagaagaacacgattcaggatgtttcttcttgtgacatttatttaaattctctggttcttatatttgaggtttgactgtagctggggagggtaggagagggatgggaaaaagaaaatggaaagatattccctggaaaagaagataattgtctaagaattgttcattttttccttgtcttggcactatgagacactgggatataatataaaaggtaacagattttgagaaaaatgcatttgtcccgtagttggagaattcgttaagtttgtgaccctcaacaaatcacatattctctgttagcctcagtcattttaactttaaagtttagatagcttccatttggtgggattaatattaagatgaaatgaaattttatatatgagacctactaattgcgtattctgacagagagctacaacaccaaagctaagccctgttatgtgcttccacaggggacaaaatagaggctgtgaaaagtagatagttgagtaaagctcattgaattatttaatcagctacttccattcttaaccataaatcttgcataaccatttagaggatgctatcctgaaaaagataatcagttttacagagaagtcttggtagctctgaggctattaataaccccagttactacagtaacaaccgggaggtgaaacagattaatcagaggtaaataggttaaaataaagcttatcggagttctgggaaatctctatctatcccagagaagaataatgcataatgagtgataaaatatttgattttaaaaatttaaattacccacaaatgatctcccattcacaattggccacaaatagaataaaatacctaggaatatagctaacaaggtaagtgaagaacctcttcaaggaaaactgcaaatcactcttcaaagaaatcagagatgacacaaacaaagtgaaaaacattccatactcatggataggaagaatcaatatcatgaaaatggccatactacccaaagcaatttatagatttaatgctattcttattaaactaccattgacattcttcaaagaatttttaaaaaactattttaaaattcacatggaaccaaaaaaagagctcgaagagccaaggcaatcctaagcaaaaagaacaaagctgaaggcatcacattacccaacttcaaactatactacagggctacagtaactaaaacagcatggtactggtacaagaacagacatatagaccaatggaacagaatacagaacccagaaataagaccacacacctactagcatctgatattcaacaaatctgacaaaaacaagcaatggggaaaggattccctctttaataaatggtgctgggagaactggctagccatatgcagaagattgaaactggacctcttccttacaccatatacaaaaatcaactcaagttggattaaacacttaaatgtaaaacccaaaactataaagaccctagaagaaaacctaggcaataccattcaggacataggcatgggcaaagatttcatgatgaagaggccaaaaacaattgcaacaaaagcaaaaattgacaaatgggatctaattaaagtaaagagcttctacacagcaaaagaaactaccaacacagtaaaaagacaacccacagaatgggagaaaatttttcaatctatgcgtctgacaaagatctacaattcagcatctataaggaacttaaatttacaagaaaaaacccattaaaaaatgggcaaaggacatgaacacatacttctcaaaagaaaacatacatgtggccatgaaacatatgaaaaaaagctcaatatcactgatcattagagaaatgcaaaccaaaaccgtaatgagataccatctcacaccagtaagaatggttatcattaaaaagtgaaaaaacaacagatgctggagaggttgtgttggtgggagtgtaaactagttcaaccattgtggaagacagtgtggcaattcctcagagacctagagacagaaatactgtttgacccagcaatctcattactgggtatataaccaaaagaatataaattactctattataaaagacatatgcatgcatatgttcattgcagcactattcacaatagcaaagacatggaatcaacccaaatgcccatcaatggtagactaaataaagaaaatgtggtgcattatgtagccatgaaaaggaataagatcatgttctttgcagggacatggatggagctggaggccatccttagcaaattaacacaggaacagaaaaccaaatatcatatgttctcatttataggtgggagctgaattatgagtttatagttctcattataggtgggagatgaatgatgagaactcttggacacatggaggggaacaacacacactggggcctgtcggaggtaggggatgggaggagggagagcatcaggaagaatagctaacagatgctgggcttaataactaggtgatgggatgatctgtgcagcaaaccaccatggcacacatttacctatgtaacaaacctgcacatcctgcacatgtacccctgaacttaaaataaatgttggaaaaaatatatttaaattactattatatttatcaaaattattatatttattggtataacagtaacagttatcctttttagaccttaatatgtgccagacatattgtacattaaaatatattatcacatgtgcttttcttaacagactatgaggtaattattattatctaaattttcagataaggaaaacatctttcagtttgagtaccttgcccaagatcacagctcataatttgttttaatgatataccttagataatcagtattaaaatttacataatacttcagtcatttacactaataagaaaagtatttgagcaaaatattaaaaaaacaaaattacataatttcaaataacacagcttttactaacccattaaattcattacaaggaaccagtctaaggactgttgattgaatcaaaagagtgatggtgacattctctttctaattgtcttgaaattaatacaaaacactaatttatatcacatattattcatatgaatttagttaacaacatatattaattgattatgtataagtgctttcaaaatacttatgatgtttgaaaattagacacacattcgtattttaatgccccagttacacctctcccaatgtattactgagtaatctttttaatttttattgcgcaaacagaatctcaggtaagtctttgaattaattaatgctggtgattagcaaataaacaccctttatgtttcatatgtcatgcacaattaaggacctgaaattaattgaggagaatagagaacctgcattaacgagacattcccttgctaccactgttgtaagtatccagataatttgggggttcattatagacatggaaaaagtattttgtataaggagaatcttcccatgtctgcctttggttttgctctctccccattacccttagttttatgattttctcctttttcaaatctaaagtgttcacagatcaatctgaagaattccatatggattcaacagaaatttactaaatgcctaaaatgtgctaaagatatagacaaaataactgcctctgttgtgtatgtatattttgggggaggaaatacactaaaatattttttaatcaaatattttaccagccattatgcatcagtcactctctaggtgccaggaatgttgcatggaaggaaaatgggcatggactctgcctcatggggctgagactgtagtagacatgacaaacagttgtcttttgttttcctatcatgttaagatctgggagagcattccaggcaaaagagagtgcaaggctctggaggacagtgtgagcttcgtgaaagaataagaaggccagtgaggctggaacagaacgggttggttggacaattataggagacaagattggacaagtacacatgtaagacatggtaaggagatttgattttatcctaatggtaatcagatcaaatatctctaccctaacacttcactgtcacatttcataaagatatatacaaatgtgaaatcttccagtgaattttttctgcttttttttttctaaacaaaccttcatattctcaaaactaaggagatagcacccaagagcagaacctaaggagaagcaaatagaaaaagagaaattaggaaataagaaagttagcagttttctttgatagcaagtggaggaattaaacattcctacactgggctgggtgtggtggctcgcgcttgtaatcccaacactctgggaggccaaggtgagagaatcgcttgagctcaggagttcaagaccagtctgggcaacatagtgagagccctatctctacaaaaactttaaaaagaaattagccgggccggtggaatgtgcctgtcgtcccagctactaaggaggctgaggcgggaggaccatctgaacccaagaggtcaaggatgtagtgagctgtgtttgtgtcactgcactccagcctgggtgacagagaccctctcaaaaaaaaaaatcctacattggaagaaaggagaaataacttctatttttacattactaaaggggaaaacacgaaatacaaagctgtcacctggcttccgtcaacagtgatctgatgatgaacggtgtcccctcagaatataaaggtgttctttgaacgttcacaggagcgatacctaacccggatcatagagggtgtttgtgttcagaggacactaaatttgagtccctgcatgcatcacacaagtcttcgcccaaactaccatttgcaggctcacttcttagccccacccctactgagaacgcagagccatttgcacgcttcctgtccttggaaacggaagaaacttcaattacatgatggctttatgctacctagacctctttcttcagtctttggcatgttctaatctcggaggcgactttacacagatggcaatagcattcgcagcttggaggtcttttaccagtggctaaaacttgatccaacagcctcagccggttccccctgactccagccctctagatgcttctcaacatcaccttcatctcctttcctttattcaggacagtcgtgccaagaaatgcctaagagaagggtgaccctggaaatgtcttgactctgggaagatcttctaaccactccacatggtaataagcacagtgttgacaggtgtgaggactgaagtgggagatcaaagaggaaaagccacgaatgagggtgtggggggcagtcaagagaagctcccaagggagcatgatctgtgtaaatgcagattctctgggtattggaagatccttggggacaaatgccaagaagacaccaacttcttttatcagcatctctcagaatccatgccctgtgggtagttatatgtgaatatcagaatcgccctccactgccagggagacccaaggcttaatcttgtatctaatttggaaacaaaaaaaaatgtatatgatgaaattattctgtagttttgcttgtagcagcctcagttatcttaaatattcctccaacacattattttctttattaactgttactatgcccatggcattcatcactctgacactttcataatggattatgaggcttgtacttgtactgatttatttatgtatttgtctctgtttgttttttagagatgcgggggggtctcactgtgttgcctaggctggtcttgaactcctgacctctagttatcctcctgcctgggccttccaaagtgctcagatcatgggcatgcacccagccacatttttaacctatataaatagagatggggagaaaaaacaaaaaactccaaagcatttttccttctgtcttacacagttacttctgacatcaggtatgtggagatttttcccccacaccaagcaattctccagcagacaccgggttcctctaaatcaattcaattctgatactatttacctaaaaatagcatcagatcccacagattgagggatcagtcatgcaaaactgcccccttcccacttcagatgccagttgctatcacctgtacttctgaccatccaattatagattggaggttcccacaaacctttcctcaggttcaattaatttgctagagcagcccaaagaactcagggaaacacttacttacatacactggtttattacataggataagacaaaggatacagacgaacagattgataaagaaaaacaaaacacataggacaaagtatgggggaaagagtgcggagcttccacaccttcttcaagagcctatcctccaggcatctttccgtgttctgctatctggaaactctccaaactctgcccttttgggttttaatggaggctttgttatgtcagcatggtgagttgattaaaccattggccattggcagtcaactcaaccttcagcccctcccttctccccagagattgtgagtgggtgaaaatcccaaccctctaatcctgccttggtctttctggtgaccagccccagccaccagtcacctcattagcatgcaaaagacactcttatcactctggagattccaagagttttaggagctgaagggcaggaaccagggtcagaaaccaaatatatacttcctattatatcacaatatcacacacactagcttgggtcaatcagttgcattaattatttgtgtatgatgtgaagtactctttttagtcacaaatttatctctttcaaattaccaggtaggaagtcaaagggaaaattctttatttcacttttggaaaactaatgaataaactaaattagtaattacatgctatttccacttctgtaaaaatgatatagaccctatatgcctgttatgaataatagatgagctttgcaatgaagagctatgcatgttactttttattagaatgagtatggcttcaatttttatgtgactatcaaaagagaaatatggttcttttttctaatttagagtttatctaataatggtccatgagctcttgtgacctctctttaaactaaggtacatctcactgtttcaactcatgcctctgtgtcctgctcagtgattcaccatctccctatacaagagatccccgacctagcaagctcatctacaaacaaatattcttattcttggaacagagttgccaaaagcagaggcacacagaaaaaaaagtctgtgtttgagagctcaggagagagaggagccaaaagaaacatctaccagcagctaaatgatttggttcctgaagggattcgcttccatgaataagaatacgagtaggtactctcattggtacttcttccttatctgtaggtacctgagatgactgtgtcctctaaagcttctgtgatgctagatgcacccaacatcattttctataattgaggatcgtagctttcccctgtgatcctctggctctattgtgggaagatagtcaaaaaatcatcttttaaagtaggaaataaacttctttttatagaatcagctccccttcctctgcgcttgtggtttccattactataaaagagagcactgaagtccaaagaaagtactgtgtatttcccttttggggccctgatgttctgcccatggcattcatgcccccaaaattgtttcatgccaccatgaaattgcctccacgtggtgcccatctttttcccttcactcatattctcaacatttccagaaccagagagagagagacagagaaacagagaagttctgacctcaacaccaccttttcctacagaatatgtggcacccgtattttgtcagagaagacaaatgcgttgttcctcagattggtaggattcatgggcatttcatcctcataatatgaggttgtatgcagacagtgcctcctggtatcaagaagccatgtgagttacaccacagaggagaggaagttaggggtttcaaatatttcaaagaataaggaagctaagtcatactcagaagttaacaagaactttggggagagaggaagtcaaaatacagaaatgcattcaaaaaaaagtttaggatgtagaggaggatgggatcaccatgagacagccgtccaatgcccatgatagttcctgttacagtaagccacatcttcagatagagagagaaaaggccacatgtatacttaccttgtatgaatgagcactgttgtttgatgaattccatctcttcccctcttttcagtcccttcatcctcattgtaataacaagactgctggtgatgtggccatgcagagctcttgtccctcatgttctttccacctcgatctttcacttttctctatttctgcttctcctggtcctacctgggctctccccaagggctgctcctcaccgggcagctagttacacggccaccaccaccctgccatctacacagaggccctccatctctctgtgaccattttgatgagatctctttttttcatggcatccatcttggcagtagcaagttcatagcccagagtaagaggattacctgttgggatgcacaaaggaatttaaaccccattgaaatttgtgacccaaatcattgtttatgcttaacagaaatagcagcaataagatcgattgaggaattatctcacgtactaaaacagaagacctatcattttgtgggaggtagtagccatgaatccaaatcaagcctagtagtagtacattccccagcgtgctcagaatatgcatagagagtttaaatcaaggcgtaagagtttccaacccttctatctgtatggccaagccccattcatgttagtgctggaagcattcttcctgtatctcattggtttctcgggtactttttctcaatgtctccatttaaaaacgtttatatagagttctggtttctgcttggggatgcagagaactggaaacaatgatgcttccttgcaacatgaaagaaatcacacaaattgcaaggtcgcaatttttttcaacccatcacagagctgggattgagcttccaactagcttgaaatctaggaaagttgttgcctgagtgcttgcttacctaaggcaggtacagctgggcactggtaagaagaatttagctggaatcatttaaaaattgactgaggtcaaatgtgggctggaaagagtacagagccccaggggctcacgagtatagggcggttcacaccttcttgcaagcttcgtatccgggaatgccagtgggtgttcacaaataaaaaatgggagagtcctgagaaggcattccgcatgcttttcaaggaaaagaataaatagaagttaaaggctttatacatcgatgtgcatcaaatgagttaattaacagaatataagggaagcaaagactttactatctcatgttgagagcagactacatactcaaaccctatttcgtctgttttttgtttgtttgtttgtttgtttgtttgttttgagatggagtcttgctttgtcgcccaggctgcagtgcagtggtgcgatctcctctcactgcaacctccgcctccccattagcagggattacagtcgcacaccaccacacccggctaattttttttttgtatttttagtagagaaggagtttcaccatgttggccaggctgggtctcgaactcctgacctcatgtgatctgcctgcctcggcttcccaaagtgctggaatacacgtgtgggccactgcgccagcctcctccgttaatctattatcattcttctctaatattctcaaacttacttaattcattaacgtgatatatgttgacatctcattaaatatgtctctatttatgacatactcaacaacatgtgtgtagtgttataaaattttaatttattttataaatatttaacactaactgagtgccaggcattcttctatgcacttaaatagcagacaggcatggtggccgacacctgtaaccccagcactttaggaggccgaggcaggaagatcacttgagcccagaagttcaagaccctgtggtttcagaggctgaggtgggaagaccactggagcccaggaggtcaagactgcagcgagccattattgcaccactgcactccagcctgtgggacagagggagtgagaccctgtctcagatgaaagaaagacagagagagagagaggcatagagatgcatatgcacacaacgattacatcgtagggctgtttaaattactcattctggctgggggtctgtgctctaaaccactattggtacgctatttctgtgtggctggtctggaaagcttcacaccacccccctctcccttccctgaatttccatattccccccaaccctcattatccctttcagagtctcgcaggttgaggtgatgtgagagaggaagcagaagcgaaggttacgcgaggaaagcccctcgttaaacttgggattttcacggggactcagtccagaggaagttgagaaaaccaacttaaattacggtctcgatcgccatctggcggtggaagtccacattacatccgcggagcaatggctgggaacgttgcataatagagcggggctcaaattccaaattaagtttctgaattttttccatctggaattttatttgatgattagtctagcatcgtaatggtgtccttcgtgttgacgtgaaaacccagtcttccttcagttcatttcccgtttattagggatgcaaaactccagccacagatgacctacgactctgactccttccccacctactttaccctcccctcccccagtacattctggggctaaaccctaagaggtacccatgcatcgctgggccgatgatgaaaatgaagaagtcttctgatgaagcgagaccccggaagtgcagcttcaggcaaaatcctgagcgaattctttgctgccaggacagtccataggctcttactcttagaaattacgtaagcatgagcagtcaacgctgaaaagcagagaatgtggttttctggcggactccagagggagaccaggaaatcctctcacttacaatccatcaagagtagttcctccaaattgagtacaaagtctctaaaggccagcagagacaagtaaggacttgtagtgagctgcagctcaccacccggatcagaacataaaagacaggagacctcacggcctggagacccactagagcaaaatctgccatcccaggcagggaggagaatcaggcggaggcctgacatggtgaggccttgctccaagtggagaaggtgcataaacttaacaactttgttattgccctgaggatgtgatgtggcaaaggggacaaggattggatagattgtcttactgatggaagttggtaacaaacaaggcaaatcaaaaaagaagccatgagatccagggaactgctgtacaggggacatggctgcataatattagtatagtaactcattatgcacttgtgtggcagacagtggctgaattctggagacggaaaatattaataagacacggagtcctgcttaccacccaggagacatattagcaaacaaaggggcacagcagaaatgtgtgtaaaattaggacattgaagtcacaaacaattaggaaaattttctagtggaaatgacattcaagctgatcgagggtatatggagaatggcttccaagtctaacaaagcatgagcggcttggacacttggacaggcttcgagggaagtgaaagtctttcggaattggtaaaatgggtgggtgacagatgaagcagagggctagggatggatgcctcacacaccaggctaaggacttgggtctttgatctgcagtcagtaggaccagtatgcagactgatagtaagggaagggtcatgggcagcttcacgttttagaaagactactctgatgggaagagtgggttagaggagcataaaattgaaagcagagaaagcagcgtgggtaactgttagagtaacacagaccagacatgatggggctcgaattaaagtaggatcagggatctagagagagggtcagagacatgtgagggagcagatgcaacatgatgtgtcgtcatccattgtatatgggagagaggagaaggcgagagcagaagatgcttgggagaccaagtggttagtaattccagtcatcaagaaaggacagtttaagagaacattccatattagacattttgtatttgtagggcctgtgggtcatccagatgaaactttactctgtgtggtagatggaataatgcccccaactgccacccctgaaagatctgaatctatgaaacctgtgaatctgttaccttacatggcaaaagggactttgcattagtgattagattaaggatcttgagatggggagattattctggattagccaagtggtcctgatataattacatgggtccttctaagtgaaagaaagaggcaagagaatagaagaaggagatgtgatattagaagcaaaaatcagaggaaagtgattgctggaagggggcatcagccgaggaatgcagctggtcgctgcaagctggaagaggcaaaaacagattatccgctaaagccttcagaaggggaacacagacaagctaacaccttgattagccctgtacaagtgttaaaagaaaaactttgaacaaatgaaatttattttgatttatttgagcaaagcacaattcatgaattgggcagcatccaggaccagaagaggtacagagagctccactgagcaataggggcaggcaatatttatagagagaaaaaggaagtggtatacagaagcagcttgtttacagctcagtatttgccttatttgatcatggtctgatcagttggcaacctgtgattgcctgaagcttggctgctgtgtttgcctgagactcagctatttattacaagaatatgctcttaagttagggtacaattttcttacacattaagttagatttcagtatactacgtaggaattcaaagtacagaggccgctttaagccaaatttaatttaatttaacaggacccattttaggcttataatttccagaactgtccaacaataaatttttgttgttttaaaacactaaattgtggtaatttgttacagcaccaataggaaactaatatatcctgtaatcacgaagcaatatagctcaaacctcaggcttggggaccatatggatttgagttcttatcatagctccatcgcttcctacccatatgaacttgcgtgtcttaattaacctccctaagcctccactttctcatttgtaaaatgggactatctactagaatttctgtctggaaagaggaatggggaggcagtgtggtcagctgttttgcataacaagccctgtagaaatacagatgctccttgacttcaggtgggtttgtgtcctgataaactgcaagttgaaaatgcattcaatacccctaacctatcaaacatcatagtttagcccagcctaccctcaacatgctcagaacacttacattagcgtggctgactgggagctgtggctcactactgctgctcagcgtcaggtgagagtgttataccacatatcactagcccagagaaagactgacatttcaaatttgaagtacatttcttccagaatgtgtactgctttcacgccatcacagctgaacaatcttaagtggaaccatcataagtcaggaaccatctgtatttgatgttttaaaccatgtcatgtataacttttttaaaaaaaagataaaataattttaaatattaaaataggaaaattttaaaaagaaaaaagacattttttccttttctttttcttttctttttttttttttttaggcagagtcttgctctgtcacccaggctggagtgcagtgacatgatcttggctcactgcaggctccacctcctgggttcacaccattctcctgcctcagcctcccgtgtagctgggactacaggcacctaccaccatgcccagctaatttttcatattttttagtagagacagggtttcactgtgttagccaggatggtctcgatctcctgacctcgtgatctgctcacctcagcctcccaaagtgctgggattataggcgtgagccacattttttattttctaaaatgaaaatgttgatatttaatttttaatccccttcaaaaaagcaactactctgtttatgagatttatagagaattccatatagttaatactaaatacattcctacatcagaatttgtttaatacaaaatcaattatttaggttaaaatgttaacactcttccgctaaattaccactgcaattgtgtaacttcaaaatgctcaggatattgtcaacagaggaaatagaaattgatcttctagcacaatagtcaaacaaaattgactatacaagattttggatgcttgttacactgttgactcaaaacaattctaaacaactcaatgtacttgatggacagaatgtactaagaaaccaacaaaagcaattcatttcttacttagctacataagctaagtaagaaaatcgcaaatgctgacatccaaggaagctttccaagcatagaaataaactctgatagattatttcagatccaggatatttggaaaataaatcagattgcctttttggataattcctaaagaatcacacaattatgacttttgaatcctttattaatggaggttacagcagcctaaataacttgaaaagtggggttggctctcaaataacatggagggtttgttttagaggaaacatgtaacacgacaggactccagaagcacgtgctttaaggtataaggacatgtacccctggtgacagaggatgtataaatattgtgagtccaaatatataggccacttgtttaagaaaaaaagacattaggagtataaaaaggaatcaaatgtaagtgcaaactcataataaatctaaactacatgaggcataaatcctaaataagtgcttaagtagctgaaatagtatcactttatgttggaaacctgaaagggactaaatatatgacatagagtccatatttaaaaacttcatgtaggcattaaatagaaaggatacagctcatttgacaaccagtagaacaggcagctatttaaagaagtgtaatccaagttaatgatgtacatatatgaggtattagaatacgtaattcaatggccattcatgataaaatgctcagaaaatgcaaatagagaggaactgcctcaatttgataaagagcatctgcaaaaaatcttacagctaacacagcggtgaaagactgaaatttttcccccaaagatcgggaacaaagcaatgatgtccactctcgccatgcttattcaacatggcgttggaagttctagataatgtaatgggcgagaaaaaaaaaaggcgtgcagatttcaaaggaagaaataaaaatggatcaaagtctaatatgtaaaacataaagtcacaaaactctcaggagaaaatcttcaggatctaggattaagcaaaaagcttttagacttgacaccaaaggcataatccataacaggaaaaattaataacgtgcaactactagtggtttgtcctcaccaatttgtatttgaggtttatggggatactttgacacttagttttgttgaaaatgttaagatgctgtattaaattatactttttattttgatataattgttgattcacagacacttgtaagaaatgttacagagatatctcatgtacattttacccagtttcccccaaggataacatcttgtaaactacagtaaattatcacagtctggatattgacattgatataattaaaataaagaacactttcatcactataatatccctcattttgcccttttgtagccacagccacttccctcccatttccacttcttcattaacacagcaattattaatttccatctctatagttttggcattccaggagtgttatgtaagtggaatcatttagtagacaacattttgcaattttttttttcactcagcataattccctggtgattcatccaggtcgtggtgcctgtatccagtttgttcgtttttattgctaagtagtatttcctagtatggatataccacagtttgtttccagtttttgtctgaataaagctgctatgagcatacatgtgcagatttttctctgaacataagtcttcatttctctgggataaatgctcaggagtgcaattgctgggttgtatggtggttgcatgttttgcttttaaagaaaatgccaaactattttccagtgtggctgtactatattacattcccagcagccaaatgtgagtgatctattttctctgcatcctcaccaggatttggtattgtgcctactttttatttttagccatcatgataggtatatagtaatatcttattgtggttttaatttgtaattctctaatggctaatgacattgcacatgttttcatgtccttattttgtatctatgtatcctttttggttccatatgcattttaaaatagtttttactagttctgtgaagcatctcaattgtagtttaataggaataacattgaattataaattgctttgggcagtatggccattttgatgatattgtttcttcctatccatgagcatgcaatgtttttccatttgtttgtgtcatttctgatttcattgagcagtgctttttagttcttcttgtggagatctttcacctccctggttagctgtattcctaggtattttattctgtttgtggcaattgtgaataggactgcattcctgattttgctctaggcttgactgttgttggtgtatagaaatattagtaatttttgcacattgattttgtatcctgagaccttgctgaagttgtttatcaacttaagaagtttttgggctgagacgatagggttttctagatatatgatcatgtcatctgcaaacaggaatactttgacttcctcttttcctatttggctgctctttattcttttctcttgcctgattgccctggcaaggacttccagtactatgttgaataggagtaatgagagggggcattcttgtcttctgccagttttcaaggggaatgcttccaggttttgcccattcagtatgatgttggctgcgggtttgtcatagatggctcttactattttgacgtatgttccttcaataactagtttatcaagagtttttaacatgaaggagtgttgaattttatcagaagacttttctgcatctattgagataatcatgtgggttttgtctttagttctgtttatgtgatgaatcacatttactgatttttatatgttgaacaaacctcatatcccagggataaagcctacttgatcatggtagattggcttttggatgtgctgctggattcggtttgctggtattttgttgaggattttttgcatcaatgtttatcaaggatattggcctgaagctttcttcttttgttgtgtctctgccaggttttggtatttagatgatgctagcttcatagaatgagttaggtaggagtctcttctcctcaattttttgaaatagtttcagcaggaatggtaccatttcttctttgtacacctgatagaattcagctgtgaatccatttggtcctgggttttgttttgttttgttttgttttgttttggtaggctatttactactgactcaatttcagagctcattattagtctgttcatagattcaatttcttcctagttcagtcttagggggtgtatgtgcccaggaatttatccatttcttctagattttctactttatgtcatagaagtattcataatattctctgatggttgtctgtatttctgtggggtcagtggtaatacctcctttgtcattcctaattgtgtttatttgaatccttctctcttttcttctttattagtctagctagaagtccatctattttattaattatttcataaaaccagctcctggattcattgatcttttgaatcatttttgtgtctcaatctccttccattcagttctggattttggttatttcttgtcttctgctagccttgagattggttggctgtgatactctagttcttttagttattatgttaggttgttaaattgagatctttctaagtttttgatgttggcatttagtgctataaatttccttcttaacactgctttagttgtgtcccagagcttctaatgtgttgtatctttgttctcactcatgtcaaagagtttcttgatttctgcctgaatttcattattttcccaaaagtcattcaggagcaggttatttaatttccatgtaattgtacggttttgagtgaacttttttgtcttggtttctaatttgattgtgctgtggtccaagagattttttcttatgatcagttcttttgcatttgctgaggagtgttttacttctaattatgtgatcgattttagagtatgtgccatgtgacaatgagaaaaatgtatattctgtctttttggggtggaaagttctataagatgtctatcaggttcatttgatccagagctgagttcaggtcctgggtatctttgttaattttctgtcttgatgatctgtctaacattgtcaatgtggtgtcaaagtctcccactatcattgtgtgggagtctaagtctctttgaaggtcgttaagaacttgctttatgaatctgggtgctcctcttttggaggtatatatttttagaatacttagatcttttgtcgaattgaaccatttaccattatgtaatgcccttcttcatcttttttgatctttgttggtttaaagtctgttttgtctgaaactagtattgcaacccctgcttttttctgttttccatttgcttggtagatttttctccatctgtttattttgatcctatgtgtgtcactgcatgacacacatgagtcttttgaagacagcatactaataggccttggttctttatccagattaccactctgtgccttttaattggggcactagcccatttacatttaagattagtattgatatgtgtggatttcatcctgtcatcatgatgttatctggttattttgcagacttgtttatgtggttgctttatagtgtcactggtctgtgtacttcagtgtgtttttgtagtggctagtaagtctttcctttccatatttagtgcttccttcaggagctcttgtaagacaagtctagtggtaatgaaattccctcagcatttccttctctgaaaaggttcttatttctccttcacttttgaagattagtttggccagatatgaaattctgggttgaaattattttctttaagaataataaatgttggccccagtctcttctggcttgtagagattcttctgacaggtccactgttagtctgatggacttttcattgtaggtgacctggcctttctctctagctgccaactgtttttctttcatttcaaccttggagaatctgataattatgtgcctttggaatgatcttcttgtgaagtatcttactggggttctctgcatttcctgtattttaatgttggcctctccagctaggttggggagattctcatggatgataccctgaaatatgttttccaagttggtttcattctccccatctctctcaggaacaccaatgagtcatagatttggtctgtttacataatctcatatttttcagaagttttgttccttccttttcattcttttttctctattcttgtctgactatcttatttcagaaagccagtcttgaagtgtggagattcttttttccactgggtcagttctgctattaatagttgtgattgcattatgaaattcttatagtgtgtttttcagctctatcaaattggttatgtccttatctatactggctattttatctatcagctcctgcattgttttatcataatttttagctaccttggattgggtttcaatgtacttctgtagctcaatgatcttcatttctatccttattctgaattacatatctgtcatttcagccatctcagcccagttcagaatccttgctcgagaggtgatgtggtcgtttggagaacagaagacactctggctttttgagttgtcaaggttcttgcctgattctttctcatctttgtgggcttattttcctttaatctttgagactgctgacctttggacagcaaagatcatccaaccttttttatttatcctatttatcctatttgatgactttgagggtttgattgtggtataaggtggattcagccaactgacttcatttctggacaattttatttggccagtattccactcccaactcctggactgcatgctgtaattctttgggacttgtacggggccctgactttgttctctgtttcctcagaattaggaatccgctgtgatgggcggggggtgggggaggtggcaggagtggtgcagtccgaagtgctcccagaccactggtcactacactccaatgagtggtgtcagccaaagtgtttcatagtacagtgacaggaggatctgtccttgtttgagtgtaccagcagcagtggtagttgaagctgcagcagagtactagcaggtgccggggtgcccacctccctgcaggcatccaccacagtggcagaggcaatgcaactgcaggaaaggaagggggtcccctgctggcaactgtgtgtgtggtcacacaggaagtggtgttggcttaggggcaaggcattggcaggtgcaggtctgcgtgccttttctgtgcaggagtggtcactcagggtgggggaggatcagctgttctctgcacagtgttagcacagggtgggatgatggagggagtggggctggctggctctgtgcccaccaaggctctgtctgcaatggctgtcaggagggaattggtggggggtgaattacactcctatatgctggtgaggcaaggaaaacaaaacccacccagcagacatgtaccagcaaaatgatgtggggagttgctgtgggcccagaggaagctgcagtgtggggagggagcatgcaggctggtgcctggtcataggggcctcctcgttggagctctccacttactggtcagtcatggtctgccagtgtagaagctatggtgcaggcccacagagcacctgaggctgctttgcaagcagatgtggccaggccagggccccaggagaggccagaagaccaacggttgctcaggtagaaccagactcatctgatgggcaagaccaccctacagatttcaggaccaacagtttccctagggctaatgtctcctatgggagtaagttgagcctagggaaatggccatccctggccatgctccactgcagatgctcctgcactgaatcctctaggctccacacccgctggcttgccacccctacggcttctctaagcagctcttcctgccaactcaagtgtccatggtggtcaatgggtctcctcctgccatggttgcagaggtcatagtgacagtgggttgttccttgccagttcaactcacccattttcctggagccattggaggacaggaatgagtctggatgtgctgtagccccatgtagggctcccagctttctcccacttcagtccagcttctgtgtcttccctctgtccactctaggtgccttctgtctgaacatctgttaggagcacgccagtcatctgggttcctcattgagaactgtttcacctggctgcatctagtcagcgatcttgccctccccccaaccaagatacattccaataaaacttgtggatactaaagaaaaagaaaataccatctggatactcagcaaaagtagcaatgacttattaataattagattatcatcagactttttgatagcagttatgtgaaaatgtagtaactttttaagatactcaagagcggaaaatggaaccaagatttttatagccacaaaactgactttcgactatgaagtgcaagaacttcctggtgtggactgtatatgccgtcccaaaattcatatgatgaaatcgtaacgcccaaggtgacagtaccaggaggtgacgcctttggaaggtgattaggtcatgagggtgcagcccttatgaatggcattagggcccttataagggagattccagatagctccctttccttctgccacatgaggtcttagtgagaagatgctgccagcaggccttcaccagaaccctaccaggctgacacactgatctcagacctccagcctccagaactgtgaaaaatacatttctgctgtttttaagccatccagtctctggtagttggttatagcagctcatacaaactaagacactttcctaagtcttcctgaggcacctaggagaaatagtttcaaacaatcatgatgactacatcagtagcttataattcttttgatatcaggatccctttttattcataaaattgttgagaacaccaagaagctttagtttacatgggttatgtaaagtgacatttatattaatttatttgttattaaataacaataacaaacccattacatgttaacataaacaacacacttttatggaaaatagctgtcttctccagcacaaaaaaatagtgaaaaaaaaggaattattttacatttgtaaaaatctctttaatgtctggcttaataaagctagcttggttatatattcttctacattcaagctgtaacaatatgttgttttggctaaagcacaagaggaaaatctggcctcactcttatacacagttgggaaaagaaggaaagtttccataaccatttcagctatcgtaactgttcttccttgataagacaccaaaactcaagaaatggcagattcttaaaggttagttgcagtgtggaatctgaaaccttatatattaacttttcatattctgttgtgttaaaattcactagtctatctttaaatggatctttatgcatgactttgcaatatcatgcattgattatttgtaaattattgattcatgggtttacgcagatttttaaaatgttgacatattttattaaacaatattttttaagccatatttgttaatatcaccaccaatctcatcagaaacatctttaagtagtgagaagctgtggcacacgtaagttttccaaaattttaattttctcttgaaattccaatttccactgtcaatattattttctttgatgggataggctcattttgtttatttttgagaaaatttctaccaaatacccaagtctgaataatcacagtgtgcctttcagtcattctttcaaggaaaatgatgacccactaaaaaaaaaatgtttaacttcactcacaactcatgcaattacataatggcttttccacaggacaactgcctttccatcagtatgcaccagaaatgctgcctatgttcttacactgactattaaacagatgtgtgcttgaggtttaaaatttagtaaactaatgattttattgcttcatcaaggtcactggcttttgcttttttttttttttttttttactgtaagcttatggcgagtgaagaacatgacctacctgtacagcttgtgtcaccaccttgatttgtgctcaggcactaacagtttcacgtgaccaccatagatttctgtaccaatatgtaaataatacagtgaaaaaggcaaataacatcttagtattagtacaaaaatagcttgacttcataggccccttgaagggtcccagggacccccaggaatccatggaccacaccttgaaaaccaccacatgacagggatatcaacataaggaatgatggtgagcattaaacatatctctactcacagaactaagactaacaagggagcaagtagtctatgcaatggtacaggatcaactaatatagacatagttcaactagaaagcgggggagaacataggtaaaaagggagaacacaggtaatagggagaatgtaggtaaaaagaatttcaaccgttttcagtagccattttggtggttgtgtatgagtgttattatccttagactgctgtctatgttaactcaggaaaagcaaataagtatggacattctaattgtgtctgtccctgtgtccttgaaaaccagagttcttggtataaaagaaaggagatgcagaagtaatatagagaagactgatttttttttaagatggagtattgctctgtcaccaggccgcagtgcagtggtacaatcttggctcactgtaacctccacctcccaggttcaagcgcttctcttgcctcagcctcccgagtagctgggactacaggcgcgtgccaccacacccagctaatttttgtatttttagtagagacggggtttcaccgtgttgcccaggatggtctcaatctcttgacctcgtgattcgcccgcctcggcctctcaaagtgctgggattacaggcgtgagccaccgtgcctggatgactgatttttttaaatgtatacatgtataaatgttttattgccattgaacaggctggacacaatgaccattcctatctatttaggctcccccactgcccctctccctgctttctttccatgtcctgaccgaaaaatcacagaatgcctctgtgacccagccagctgcaggtttttcccagcaggctcgaacccaagccaaggccttgaacactcccaggcactgataaacgtatctaggttgtttctctaaacactgaaactttgtcccagccctgagccaggttccttaaaccttcatataagctccataccctgaccccctcgctgcagacatacctaggcagaacatcccttttctcttgctgtctgcaaggactcctgaagccctctgtaggtaaattccctaaacaaatgttttggactgatcaccctggcatttagtgcttctttctttgaatcctaacccacaccatctcagaatggtttcaggaacttccttgtggtaactcccttgacgccacttttgaggtgactccagcagcgggttcagtgggacaaaacaccctaacgctggattatagtcttaaatgtcatttcccactaaactaaaccagggatttctggaaaaatggctacctccaggtctggccaagaaatgaacaagatgaaccagaaacatgttgtcatcccagataacaaagaaattatcaaaagaaatttgcgtcaaaagaactcagtttcatttttagccacttgaagaagttttcactcaccaaaaatgtaggatataagctttaacaagcataaaaattgcaatagagtaaaacctatcaaacatttaaatccttctgtttataattatttaaagaatgaaaagtaaaacctgattggccatctgtaggttttattaatagtaggaaaccaatttgctaacttgaaaactggtaaataaaaggagagtcaaacactgatcctgcctttccactgtaccactaagtagcccactagtaagtggagggaagtgtctcttcactagtaaatgaagggaactgtctctttgtagcattaataaagcatataaatgaagaaaaaatgacagaataccaccatttagcaatccccaataaattaacagacctaagcaattagtatcaatggttgctaacatcacaaaaagaaacagctggaaattatgtctctcatggtgaaaggccacaacaccacgtatagattttccaaaggaaaagattgaaccagagtctgatccagcctctgcatccagatgccaatttgcgggaggcacagaaggcagaggatgtgttacactgcaccatgtgtacgcagccagcaaaatccagagtgtgggaaactctacaggtcaaatggattgagcttttcaacagattaatcataagggggaaaaaaaggctgaagggggagaaaccagtgaagtatgagagacgtaaaagacaactaagctgtggcgtccaggaacacatacctgggggactagactacaaagacatgaaagaggttacaataaaatcaggatatggtcactttcgaggggaaggagaggctttgattggcctgacgtacagagacttccgctggagctggcaaagtcctgttccttgacttgattacaggggtttttcttaaataattcactaaaatgtacattttttgtatctccattttatttgacaataaaaggtttttaaaaacagtgaaaaggaaacagtgactacctgagcatttgtcttctgaagactgtggagactgcagttggaagacagaaagctttggagatcatgacttataggagtagggctggaccacagaaaagtaaatgatttggggctggaaggagtaaggtctcaggggagtttctggacaatgcccttggcaatggggattaatgatgtacacgtagaagggagaagggcagatgggtgggagatgcatgatctcagaacacagagctccagaatcagttcgggctcctccaaggatcagggaagagagttattcccagaacattgacctcatgaatgtcctttacctcacccagggcccagactactcatcactacttcaggctccagagagagaagcttcagtgaggaccttagcatgactgagggagcagaacagctcttgagacctggaggcacagtgatgaaggtctcaggaggcagcctcaccaccccccacagccgttccagagactcaggggacagtcccatccagacagcagcaaccttactcctccctacccccatgtcatctccctctggccaaagaaccgggagaatgatctgccactcaaagacaaggaaaaagagacattacctcattaccagacatctgcgtcctcacatatcctggaaagaaatcgagaaaagaatggattgccccaattaggacccaatatgattatcccgagggaagaacaaatggctggcaaggtcagcactctctctgcttatcccatttctagcttcagaaaaaaattatcccggtgatccctgagaggcacaatcagctttccttgcctcagatcattgacgttagggaaggtgggagtggggaaggtctgggacaggtggcagggcactcctcacaggctcattacctttctgagcccttagctggatgatgattcccaccagaaggaagattagcccaagtaggaaggctgcaatgccactcagcatctttctccaagaatattcagactgagctcctatgggaaacaggtctttaaattagtaaaaatatcccaatatttaaagcactttcttggaatcccagaatctgtactagacaccaaatccaatgctagctagagaaaaataaataaatttagaaaaggttcttcgaaaccaaagttggcacccatggagttaccccccatcggttacagattctcacagcccataagaatgcctcctaaatactaagaccaaagaattagaggacaccagttcatagggttggaagcacataatgaggtgattagatctcctcatttcttggaagatatgaggatagatatctgccatgttttctcccaccctaacccaaggactctggtttctgtgactgtcccagatcaagggaaagaataattcatgttgtgaccaagataaacgcagaagtgacacaggctctgtattgagtcagtatagtcctgagtcaggcccagagagtactagaaactaattctcactccactccacagaaacagggctcagcaggctggagtgatcgacaaggcaggtgtagacatgtccaagttcaggagtcatttctagcatcaccacagtctgaaaggtccagtctccattcctgatagggccagtggacatgaccccagctctctcctcctgcccattcaggaaccacttgatcttgatatcccctggatagaagcctgtcacagagcagtgcagcagattatgctggtgcaggagtggggtcctctctgggtacactgtcacctctggttgcactaggaagggaggaaaaatgagacaccgtgaaagaaaaccaccaagctgggacaggagattctttagggactatcactatgtctaatctctttcccagatcacccaagtgaacacaaagtataggcaagtctcagcccccaagatcagtaacagggtatgtcaatgcctgtcaggaggatttagactttctgaggtactcccacaattactgcttctctttgagggcacaatagccctcgaagtccctgagaaccttgggggtctgagaccaagatcacagtggctgacttgtgaggataatatatcacagctggggccagaacatctacacagacaaccatttatcctaaagcagaaaattgcttgtaagaaagaagagccatggccaggttcacatgggggacattcctgagccccgccagacctcagcttccagctcaccttttctccccacagtgaagggtgcgcccagcctgtagttgtgtctacagaccccatccacggcctgtctgctcctctccaagagatccagccggctgttccactgctcagcatctggctgccccagcttggtcaatgccacaaacatccccacatcactgtcgaaacgtacatactcctccaagttaaagatgaatctgaccacaaactgcaccttttctgtcccgttggtgaagtaacagtcagcctttgcctgaatcacaaaatcttctggaaaaccaaaaccaaaaccatgaaccagccccctcctctgggaaaacccatgcctggtaaattacgtcagaccacatggatctaagaggaggcctttgacctcagtatgctcaaaaagcacagtgtcaagtgagaaaagaaacagaatgggattcaacagagaatgacatttattaaattttaaaaacacataaagagcaataatgctacatatttctaaaagccactctcatacttagagacttaccagacacgtttagaatggattctctagggaggggagagaatgagaacggaggcaagagaagagacgagagagtcttgcactactgccaataattacaatgtgctgtgaactcattgggtaaaattaaaccaatcctatgcacttaagaacaacaactacaataaaaaggaaattcaaatggagttaataatgtaggtaagtcaggaaggacgtcctgaagacattgcatctaagtcaagacttgaaagataattgctattaatgttgggttgtaatttacctttcctttagcctcctccaactctgaactgagccataagaatgaccttcctaggtgaaccccacttatccctcactcagtagctaatttcagatgaagttccagcctgtaatttctcagcatgtatactcttctctatttcctctagtagtctaaactaggggggaaatctgaatttttcatcatcatttaacatctgtgctgatttttttttcagttgtattgtttaatggacattataaactcagggcggtttctattctctgagaataatgatctctcctggccaggtttgttcctcttttgtatttaatgaaactaacatgcaaaggggattctgttcttagcacattacatcctgtttctgctcattaatatgtgctttcatctcacattgcttcatggctgcatattctgtcacctgtgctagaaaaataacagtgacaagtaacttgtacctggtgggcggaggacaaggacaatgtattctattcaacttctcttacttctcaaaactgtttagtacaattctgacaatataatagtggcttaataaatgacagaaggagcaacctttgtttccagtttcatttgtccacatataccccaactgagatttgtttccgtgtcctgaccaaaaaatcacagattgcctctgtgacccagcctactgcaggttgtttctcccagcaggctcgaacccaagccaaggccttcaacacgcccaggcactgactgaggttgatacacacaataaggatcctaaacaagacacaatgtttccctcttcctgcctccctaccccttgaataggtggctctggtatatgaagtccatcccatgtaaagaggcaaggcgtacctttctgccaaagggaagaacactgttctttgaaaccaaaagccacttccagtctggtctgtggcctggacttacaaagaaaggcatcactcccccatgccaattcttgcatacacactggaaaaaaacaattgctctgttcttacctggagagtctgtgccttgagtcatggaggaatccagtcgggtcagattcactagcagagccaccacccaggggacccacccagaacccattctggagaaaggaaaaaaatgagatagtaaaatcgtcagcctcttcagaatgagctcataaaattcagtcagaaagtacccattaagagtataaatcgctgtttttctggcttccccaggattggaaactcctcagattgacaaccaatcaagatagaagagttttgcatcatcaggtactgggtaggatactttcacaaagttgtgtcatacaactcaaccattgtttgcctgcagaatcactgacagtaatttaggtatactaaaaatgggctgggagaagaagtaaaaatatatgtttgacatattatggggccctagaagaactaggcagactgtttattatgtattcttctattccctggcctgttctgaccaataggtctcccttcttattgggtgttgacattgccgacaggcagtgtgtaaattaagaaggaattaagagtatgtaaattaagcattctgaagcatatgcctcaagaagatttagtaaagggattatcagagaagaaatagaagacatagagaacatttggagagtacgatttcctataagccaaaatgaccacaaaaaaagaaaagaaaagaaaacatggaaagagaattctcaaagaataaaattttgcaaaaaggctcaccaggatacaatctaagagagcattattgtgttttatggttagtagggcaccaataaccttcaagaggacagcagagtgttaaaggtagaagccatatttcaaaagaatgaattggaaacaagaaaacaaaggccgcagattaaaatagtctttcaagaattttgaaagtgaaaacaaaggaaaaaatgggatacactttagaaaaaaacaacactaagaaaaaatacttttcttgggttttttaaattgacacgtaataattgtacatatttatggggtacagcatgatgttccaacacacctatacattgtgtattgatcaaatcagggtaattagtatgtgatatatatacatgatggaatactattccgccataaaaaagcatgaaatcctgtcattttcaacaacatgggtgaacctggagggctctatgttaagtgaaataagccaagaacagaaggactatattacgtgatttcactcatatgtggaatctaaaaaagttgacctcatcgaagtaaagagtacgttaggagttaccagaggctggggagtcaggggtagaaatgggtagaggttggtaacaagtacaaagttacagttagacagaaggaatgagttctggtgttttgggaaaagaaacttttaagacaggagagacttcaacaaggttgcaagtgaagtgcaaggtatctgtagaaaggagaaactgaagagaaaaaagagaagaaaggggacattttctccaaaatgctgtggtctgaatgtcactcaaaattcaagtgttgcaatttaatcaccaatgtgatagtatcaaaaggtgggccctttaggaggtgattaagtcatgaatgcagaggcctcctgaatgggattagagactttaaaaagggctagagagagcagggatgatggctcatgcctgtaatcccagcactttgggaggctgaggaggaagattgcttgaggctaggagttagagacctgcctggaaaacatagtgagacccccatgtccaaataaaatttaaaaaattaaagaaataaacatggtggcatgcacctgtggtcttagttactttggaggctgaggtgggaagactacttgagcccagaagttcaaagttgcagtgaaccatgaatgcaccactgtactccagcatgggtaacagaacgaggccctgtctcaatcaatcaatcagtcaatcaataaaaatagaagggctggaggcaatagcttggcacttttgcccttctgccttcctccttgtgaggactgttacactggaatgatttgactcaagtgtttagttaagtattctttcagtaaaacctagacagtaaaacactatctttaagcaaataaaaccaaaagtgcaaattgtaattcaccatctatgttattattatttaaagggcaatgtttactcatcatttcacatcatctttcagcatgaaatgtgcccctgatttgcctatactgtgcatgttaagaatgaacccagggtatcatggtaaccacaagttcacttcagtgacttttttcaagtcgatggccaaggcatcaaatcttccagggccatgaccttgaacttctagcttccagaactgtgagaaataaatttctgttcttcataaattaccctatctcgtgtatcttgttacactaacacaaatggactaagacagagagcataaggcttgggggaagaagggtacacttcttcagataaaagaataaagacaggacgattagcaggggataaaggggaatgaggaagttccatttagatggttgcaagggagtcagctgagaacaaggcaagatctgtcaaaaaggagttggaagaaaatatatttgataactaagaagagcaagaagtggtctgtaagtgagtttttaaagttttaattaagcaggattcagaaaagagaggtgagatgcaattgtgcaaccttttactgttctatgacccttagtaaatgcccttggttagaggcctggatcagaccaatcagaaaaataatttcttctccatgggagattataacaggtaaagaaaaagagagcaagacgtggaagacatcgctagtgttcatcctctaattcctaggcccatggaaaacgagaaactagacttcctactctcctggagctgtgtgactcgttctcaccaatggaaagtgaacaaaaggttcctggtcaaagaatttaactcctcgtgcatgactcttctcctcctcccctaccaagtcaaccaagacagccttgtgttgagatggcacaatcccagtagaaaagcagtctaattagctgagtcaccatgaagagcagctgccccagggaatcactcacacctacaacacactctgtatgaatgagaaacaactgttctttaaagaaggtactggcttggttaccacagcctggcctgacttgacttaactgctacaggacaggagctaggaggctgacccctctccctccacatctctcatgtaaatgtgacgattcatgaagtggaaggctggccacaggcttactggtagacccccgagtacaaggcatttgaccctggttttgagtactcctcctccaggtggatggctgtggagctcacactggcgagggcttgtgtggagccgaggataaggaggcatcagagggcactcaagccactgggtctaacttcctcccttcttcctgcccacacctaccttagtctttcccagatgttttattgcatttggaaatggagacaaacactcaacacaggctaagtgaacaaggacacggcacggagatgatcagatgcagtaacagcatgagcgggtggaagaggcgtgtgtccccttctttgtagacagcaccatggctggcttctgcagcttccctcagagctgaaggaagggccatgtggagaggagaggaagggcctagacaatatggatcaaacgggggcctgtatttagatttagaggagagagggggttgataaatggcaagggatgtggggatggggaggaagtggaggatatggcgctggaccagaaagttaggagggctgctctttcttctctgtaaatgtgtctaaggctcacaaactctaaaatctgacttgcctacataataatagctaatgtttgtcaattgcttattatgagttcattttctaagcattatataaatgtgtgcgtgtgtgtgtatgagagagagagaaagagagagaatcatcacacaaaaccctttgcagtagatactatcatgatctcccttttacagatgaggtaaggatggaatgaaccaaagttcacataactagtaagtccctaggctatactttttctgtcacactgtatttcttgggaagccagggaaactttattcctacagctttagcattccggtaatgataaggtacacaaaaagggaaaataaccaaggaatttcatcatagctgtttggtgtcaggacagatctctgtaaggaaatcatatcctacctaaccaaaggaaatcagtgatctcacatgacaagcaaggaatggcatagagcctggcatgggaactaagaagagaaagcaataagcttcagttagcaagctatggatctccttagatggcctctggtacatcttaaataaactgaagcatcagattcacccccattagaagcgtttttgagtcattttctgtgcatagtgtcagtgtctacgatagaagggcctgggcttatcagagacactgttcagttctggggagacaagaggaaaaagatgtggttttcttcctttctcctgtatttatgtttttgtcttctacttgaacgagcctgaaaaatagggcagggtgttttgatctttttttcctgcctgacttcagccagcagccctccctaaatagctacaggctcctctgtgatttttcactcaagctcatattttgcttctctcttttctttccttcccctttctctgaggagtgagagaatttgggtgtatgtgtggttgttttttgagggtggcataaaattattattctccctattgcctgacacaaatatcccttcaactgctattttggtgactttgacatggaagtaaaacgtacatctcaattcattttcttccttctacttcctcctaacacatcaacataatccacactgccctggaggagttatgaaaaatattctgagtttctaggtagaatattaaatcatacttttagagaacacattgttgagctacagtttaattgaaggaattgtactaggctaagaattttgccagctcaaaatactggtttaattctttctcagtggtgattgacgtctcaaaccagcaagaggtgtaacatgaggggaaggggctggggaagagggaaaggatgtaagaaacaaaagaaatagttagaatttggggtgtccaaagcaaactcatgatcccacctagtgagaatccatttggaaactgaggaaccaaaggctttgggctccaatctgcagccacttctttgatacgactttgggataggtggactcacccgaagtattgttttacatgtactatttgcctcaatttccctgtgatggttttgtccatcacctcatcctgaaaaaataaatgttggtgatgctttgttccacatattcgttcatttgaactcattattcccaggaaatatccactgaaattcaaaatatcatgaacttccaaagggttttctagaaaaaaaaaacaaaaaaaaccccttgatcttaatgggtgttttttaatctgtgctagaatctgtttgcaatgttttatttaggatttttgtgtcagtataataagtaaattcatctacaatttttatatttgtgcattgtcatagtttaacatcaatattatacttgcttcataaaaaaattttcttctatgccattgagccatttaatttttgtttgtttgtttgtttgttttagagacaaggcctcactctgttgcccaggctggagtgcagtggcacaatcatagctcactgcagccttgaactgggcccaagcgatcctcccacctcagccaagtagttgaaaccacaggcacgagccaccacatctggctaatttttgtattttttgtagagacgggttttcgctgttgcccacactggtcttgagctcctgagttcaagcaatccgactgcttaggcctcccaaagtgctgggattataggtgtgagccactgcacccggcctctattttcaattttaaaagtttgatatagatgtagcatatctatttttttattgatagtaatatcttctatcttctgtgttcatacttttttttttttttttttttgaggcagagtctcactgtgccgcccaggctggagtgcagtggtgcgatcttggctcgctacaacctttgcctcccagattcaagcaattctcctgcctcggcctcccaagtagctgggattacaggcgcccaccaccacacccagctaatttttgtatttttggtagagacagggtttcaccatgttggccaggctgccctcgaaatcctgacctcaggtgatccacccgccttggcctaccaaagtgctgagattacaggcatgaatcaccaggcccagcctatttttttgtccacttaactggtctagtccagggaaagggaattaaagtgttctattggtagtacatttctgaatattttccttgtatctaccttaatttctgctttataagagctacctatttggtatttagaacttaaacacatgtctcatatattcatatgaattttatactttacattataagtgcctctgtcacactcaattttttttttttttttttttttttggtgaggagtgtctgaatttcatcttgtttggtaagacgaatgtgacctctgcttcccttttgtttgccttctcttgttatgtctttgcccatcatcttatttgttgaaaataatgaatacatctttctgagtggctttatgttaggtgtcttttgcatattgcaaataatagagtttttatcttaatctaatttaaaaatattttcatttatttagttcagttaagaagcccatttataattattcatacagcaaatagattcagtctaattcagagatattaacttctgttaagtataatgtttacatgagtatttttaaaaatctttcactatgtctttattgtgcattttaaaaattttaccttttcagatattaaggaaggtgtatatttcaaggttgctttgataagtttatttgtatataatacacttagttccctcttcctttagataattcctattagttttaaataatgaacaatcacaaaactagctcatatcctctcccttcctctttctgtgtgtgtgtctacctttgtagtcttaaatgtgtaaatacgagcacttgatttattagttttaaagaatatattttgattcctagatgttacagacaagaacatcaacaggcttatttgatatccttattcatttttccacttattctataatcattgagaaatgtgtttcaatttctcaattaatttcttcctataattctcctatatttcttacatattttgtagttttattgctaggtgcaaactgattcagttttagtataatgttctggtgacttcattatcactatgtaatggctgtctttgtttttactaatgcctttggttttagactatatgtttagatatttctgtaattacataagctgtctttctgtcttctgttagtgtttgctttgtgtatcttatatctggttttgatttaacattttcatgtttttaggtttcttgtgatcttatgaagggcatataactggattttgcgatattgttaatctaatctgagaactttcctttaactcccatatttaagctatttatacttgtgatcactgtgctatttacattcgtttctgttacaatatatggtgctctgtatttgctatgtcttactttgcttcttttgttttccttgcatcacttatattaaatcaattacatttttatttaaagtattatttaatttccccttactgatttaggaattttaaattctaattatattagttaaaagtcagtcttatatttttaacatgtttaccaaatgtggcagcatctgaaggtaatcaatatctctaccctcctttcaaacaagacaaagactttaggtgctttaactttgtctgcctcattctcatgtcacttgtggttgctctgccttatttttaaatttaatagtcatttttattactgatttttatcgttacagtcatatttcatttctcattctgattttccaatattttagacagatttgttattgttgtttgtgtgtgtgtttatttttctcatctttgctcccttatccttctgggtttagtatctctgttacttacatgataatattaaaaagcaaatgataactacaatacaatgctactttcacccagaagattgtcaaaattttaaaaattaacactgtctgttggttatatacatatatatatatatggagaaacagataaactcatatgttgctgctggaactataaattaatacagcctctatgaaggcaattttgcaatatctatcaatatttgtaatgtatatattggactcagcaactcccctttaagattgtatcatacttgtatttttgcacatgtgcattacaatgtctatacaagactaactagcaacagcaaaagacttccaataacctaactagccatcagtagaaggaaacaggataaatgaaatatggaacttccataaaatagaatactacatagccatatatttttaatttaaaaaataaagttcagaacagtgaacttagacagctgctgtttgcgaaaatactgagcaagaataaagatatacatatttgcttaatacacagtaaacttctctggaaagataaacacaaagctggaagaacggattgcctatgcaagaggaattagcaaaccttgagaaggattgagagtgaggctttcctctgtatacttctttgtgtcttttgaatttcaaaccacattcatatattgcttatttaaataaataaataatatattttaaaaagaggatagtaggaagataagtggagtcagggagtataggcaactcttttgaggagttttatgcaaagctgggcaagtccacctcttccttagctatgtgacccaggcaagttagtaaatgtttctaaaactccattttctcactcttagaattgagatagtaatacctgccacatagaattatcttgaaaaataaggtaagaagacaggtttcagatacttggcacagcaatagcacatagtaagcaccagtgaatgcttagtagtagtaggagtctaattcctaagagtccatggaactctaggttcaaaacccagtttcttctgggaccattagatggcatcagactcaagcaggtgctcctctagctgacagctctaaaacacaaggaagatctttgttttccttattccctagtcctttccccacaaaattctgacaattacgcatttcctgcttgtttcacaattgccatgtggattccaagtggctatccctgggtggaggcataaaggacttgaaactcaatgctgtttccacatagggccgggcagacaggctatggaggtgttttggcatccaaggaaatctatcagtttcccaagctttcccctctccattcatactttcctttagaaagaataaggcatgcctgggtgggaaagatactgcaggtaagcgacaagaaggggaaattacagggtaaggagatcaatcaaatggtgatggggggtaggagtgaacaaaaagaactctggagcaaaccaggattagtgacatctgtggttcccagacaaaccacacttacaggaatttgtctgtctagcccgaatattttgactttcagggagcatttttctgtgtccctgacataaagcctacctgggagtttcccctgagataagaaactttcaggacatcttaaggtctactgcatcttcctgtactgcccatcaagataagttttccacccagctttatcatgattagctgcgtgatttcatgtcagtttctctgtaaaattaggtttgactgttgcattatttttaagatgccttccaggcttaaagtattatgatgcatgggtataactgtactgaggaaatcaaagaatttctcagatcatcttcttctgtgagggctgcagcttccatgtagttgggagatacaggaattattattcctgttttatgaataaaggacatttgtgggagagaaaggaatcaggccagagttctttctctccaaatgcctattttaccctctgtgaaatttgagagatggatgggtgtggagctgcaagtcagccccaggatgaaagaaaggcaaatctgcacaagaaactgcccactctcactccatcctcactgcaccctgctcccaacagctgccaggcaagaaaaaatccaaaacagcagttctggggaattcattgccagcactggaaactacctgctgtttccaggaatatgaaggtttctctttcctagaatagcaactttccaaggtaagtccctcccaacaaccagtgatgtgtacaatgttgcattttcagtggtgggagtgggcagggaggattaagattagtacgatggtggagatatttattcatttattcaattgactatttattctccactatgaattagccctcggccaggtagcagatataaagcttaataagatatatggctttccgcccaggtgctcatggtctagtggaaggtcaaaaaaggtgggaaagggaagatagaactttaaaagggctgtgaaagaggtaaccgcacagtgatagaagcacatggagagttccccagactgacgacataagtaaggcctcctggaagacctgaaccctgagttaagtcttgaacttgaaaatcaggggcgagtcgagcagaaaatgggcaagaaaacaccatatgcaaaggcacaaaggtgttggggaaggcagaaagtttgtcgtggagctggatacaacaggagagggtgagacagatgggctggaacagtgtgtgctctgaaaaggatctctgcagcagggcttgagagcacctgaaggaatttccagaaatgccatcatcgtatgtgacacagaatttagaaaaatgactttgtgaagaatggccggaagagggaagctaatggtagagaaacctctctggtgatgggatcatcttaagtctatgagtgaagactataacaacgggactggagagaagagaatagattctgaattatttagagctaagagcagcagagcttttcttgatgggattatggattagggtttatggacccaagatgcaatataattgattgggtcagggtgtggactctagggtcaggcctgtgttcaaactccaactccaccactacgaccaccttgggaaagtcattgagcctctttgagcttcagtttcctcatctgtaaaatggggataataaccaacctcatagggttggggataatgattaaaaacgataatacatgaaaaacacttagcatagctcctactcccattaaaactctataaatggtagctgttaccaatgtcgctattaatactgttaatcagggaactgttctctgtccctccagaccctagcttcttcaaaatagcagacactggtaggaacaaggaaggatataggaaggcaatctcatgaatatttatgtcatttttggttaatttctatctcaaacaacagataaacgactgatgggacaggcagcaaaatagcaactatggttatctccaggaagtgaaacaatgggtacttttacttttcttctttgtacttttttatattgtctaaattttctatatgaatgtatacagttcatgtaagaaggaaaatattttaaaatatatgtattatgccacaaaatactcctcatcaccaggcaaagctctagtcaccagggaattaagtttcctggacacagacagcccccaccccaccccaccccacctctctaccccaccaaaagcacacagtgtccaaatctccatcgtgcctgcaactcaggaacagctatctggccgcacagctctagggaaactcaaagcaggaacagctctgggtcctggagacgcccctgagaagagggcccagtatccctggggcctcagtccatcagccgctgctgcaccaggcgggaatagaggtcctgtccctcctagagctgggcaagcttctgcagcttgccctcctggagcaccaggatctggtgggcgcgctgaactgtctgcagcctgtgagcaatcaccagcactgtgcgatccccacgggaattccagtcctgcagctgaaggggtgatcacagtgcctcagaaagacaggaatgagatggacaccacatccacctgggcaccatctcttatgatttagggtaaagaaggtgtgaaataaaagaaggtaggaaagggcagtagataaaggcctggactgcccttctctcccggctgtactgccacagctggaggaatggaagcccaggagggaactggggctgccctcacaccaccggattccattccccaaccccaagaaggcacagactgtttccactagtaggtccttcgtcctccctctgcccaattctgcacagtctgatcctcccagcatgcccctcccaggccccactgtcccctgccctctcacggtactcacggcctgctcgcactgcacatctagggcactagtagcctcatccaggatgaggacccgcgggtctcgtacaagggcccgggcaatggccagacgttgtttctgtcccgcagccagctggcttcccttctcccctacatctgaggaaatcagagaaattcccttcctcagatacaagtgacacagacaacacacaaggagggacaagtgcacagcaggtacttccagtaggacctcgggaggtgggagggcccagtgcggggagggcccagtgggaggagggccatggggtggggacctgacggggctgcccatggagggagcaccactgctgcattgctctctgcaaacaaagactcttgatcaagagggaggctgaagaattcagtgtgtggggaaggagacgtaggaatggaggaaagggcagaggaacagcaaacatcaagctacagggacacgaccttcaccactaagagtaagtctgattttctcttttttactgaaggagcaagcttacaatttgtagaagatacctgtgtatattccatgctccatttcctggatgaagtcatctgcgtgggcagcctgggcagccgccatcaccttatcatcttcgcagctctgcagcccataagcaatgttgttcctcacagaaccggagaacagcacaggctcctgcccaactgaaaccacctgtgcagcagggacaggggcagaggactatgtgtaaacccccaaggcaggggcccttttgtcctccccacctacctccctcagaatgaacacctggtgcgccttcccgtggatctcccatcctctctctgtacatgctcccctctcctgtcccctgtcttctccctcctcacccacctggctgtgcaggtagcagtgttcatactgtgagatgggcttttcatccagcagcacctgtccccctgtgggctggtacagattctgcagcagggcagccactgtgctcttcccagacccattgggtcccaccagcgccgtcacctcaccaggacgtagggtaaacgtcagcccctagaaaaccagaaaaagagttaagggcctgccccttctccctcaaaatccctccatttctcttcttagcagaggcaagaccaggttctcagaggcaaatgaactataggctgtgatgtccaattatgcattagcagcagagagcaagggtccaggtttcctccctctttcaggcaccttgagcacaggcctgtcagggcgattgggatatgcaaaggagacgtcttggaatttcacaaccccctgcagagtggtgggggcaagcgtgccaggtgaaggcagatttggctgtcggtccatgtaggagaaaaccttctctgcagctcccacgttgctgagcatatccccatatatgtataccagggtctggaaaacaggaatgggagagccggctaattaaacacacttctaccagaaaccaccctcccaactcctcacacactccactcacaactgcactgctcctcctccatactcaaaagagattctccacttttaaatgtacaatttggacggaatttaaaagtggcaccaataccccagtgttccaatttgcaatataaaggatatacagtcccttctcctaccatacagcattgcctctagccccagatcttttcagttactgcttcctattacttgtgcccagttctgtcttgcttgattagacggggagctccttaaatgcaggcactgtgcccaactcacctttgtagccgtcagagtgcccagcgcagttctctacacaaaaaagatgtttatcaagtgtctaggaaaatgtttaaataaagccctggatgaagtagctgtttttgagaactggtaaatgtaggaagagatctaaatgctcactctgcctttcctcatcaaactgtaccaccgggtaatgaaatggtagatgaggggaagtctcccttcatagactacttcagctaatacatgaagaatgatagagtatctcccttttgcagccctaattctgtcatggatgtaggtactgctcatcagtggctgatgttgccacaaatagagaaccagacattgtgtgcctcttggaggaagaatgcatcaccacctaaaaagtactgttgctggaaaaagaccaaaaaaaacccctcaatctcacaagcttctaggtttatctatcaatagacaggaagtacagaggcagaagagcatataataccacagggattcagtcaacaaaatccagaccctaagaaactccacaggacaaacaacctatttcttcaacaaataaactgtgcaagggaaacttttagacagatacatggattgatgggtggatggatggatagatggatggatagatagatagacagacagacttaaaagatgtatcaaccagtcacaatatgtggaccatttctggatcctgatttaagcaaagtataataaacacactcatacacatatactacatggataccacaagtggaaatttgacaattgactatttgataaattttaagaactactgttaattttttggtgtgataatggctttgttgttatacacttttaaagatgtttgtatttttaagaaacatactgaaatatttacagatgaaagtatacaatatcttggatttgcttcagaataatatgggtggggggaagtggctggggatacagatccaacaagattgggcatgagttgatcattgttaaagcacaggatgtatacatgtgagtttgtaatattattttgtctcatttttggcatatgtttaaaattctccatagcaaaattacttgcgggttttggttttgtattgtattgttaaaaagaacaaataaagcccaaggcccaggagtccacaaagaaaaagagagggaaaaaaggagagcaggcttggcttctcgctcacctgcacatagctccccacgctctcctggtagatcataaaggaaagcaggctgccctgggtgagctccccatcctgcatctgctgcagcccacagctcagcatcagcatctgcacccccaagtgcagcacctggaagaggagaagaaagagatgaggctgggaatcttcccattctttccccctctctgcctctatgagactgagctgcaaaggcctctagaaccagctgtagtttcctcttcccttgccctccccctttcctgggctcctttcacaaccactctggtatcttaccctccttacgagcaggtacaaggcgcgttccaggtctctccgccaatacagctgccgacattgttcaagggcctctttatagcgacagacttcatgctcctcggccccaaaactgcgaacggtctgcagccctccaacggcttcccgcaccacctgccccgccctggccactgcatcctggatctcccgaagcacttcctggaaaagagggccagcaaacaccagggctgatgtgcaaagacagcaggcccccacatcttactccagccagtgagatgctccctagtctacctaaaaataccaaactgtttctctccctcttccttactcttctttccagaaggaataagagtgaaggagcaagggaacaaaatattattgagctctcagtgttaggtagtataggagatacatgcaatttttttaaccttcatttgaggtaattttcccatccccagtgtctgaatcaggaaagaagggtagttttcccaaggagccacagatagttaagaaaggtggagatgtaattccaaatggatcagaggcctaaacataagagctaacactataaaactcctaggaaaatgtagaagaaaagcctcatgccactagatttggcagtgatttcttggatataacaccaaacgcacaggcaacaaaaaatagataaatcagacttcatcagaatttaaaacgtttgtgcatcaaagaactctagcaacagagtgaaaaagcaaccatgaaatacaagaaaatatttgtgaatcatatatctgataggaaattaataggcaaaacatatagtgaactcccacaacttaaaaaaaaatcagaaaatgggcaaagaacttgcagacattctttcaagaaagaaacataagtggccaaaatcacacgaaaagatgctcaatatttactaatcattagggaaatgcaaatcaaaaccacaatgagataatcctaatcacctaatcaccattagaatggctattaaaaaaaaagacaacagaaagtggtgttgatgaggatgtggagaaattggaaaccttatgcactgctggtgggaatttaaaatggtgctgccgctatggaaaactgtatggtggtttgatacgatctggctgtgtccctacccatatctgatcttgaattcccatgtgttgtgggagggactgggtaggaggtaattgaatcatgagggcaagtctttcccatgctgttcttgtgatattgaataagtctcacgagatataatggttttaaaaaggggaattcccctgcacaagctgtcttttctcttgtctgctgccatgtgaaatgtgtctttcaccttccgccatgatttgaggtcttcccagccacatggaactgtaagtccaataaacctctttcttttgtaaattgcccaatcttgggtatgtctttatcagcagcgtaaaaatggactaatacatggttcctcaaaaattgttaaatagaattgccatatgatccagcagctccacttctaagtatatacccaaaagaaccaaaagcagggtttcaaacaggtgtacactcatgtccacagcagcataattcacaacagccaaaaggtggaaacaacgcaaatgtccattgacagatgaatggataatcaaaatgtgatatatgcacacaacagaatattattcagccttaaaagggaggaaattctaacacatgctacaatatggatgaggcctgaagacattacgctaagtaaaatatgccagtcacaaaaagacaaatactgtatggttccacttacgtaccgcaccgggagtcatcacaattcatggagacagaaggtacaatggaggttgccagcggccaggggttgggggtagtaggcagttactatttagtgggtacagagtttcattttaggaagatgaaaaaagttctggagatggatggtgatgatggctacccaataacaatgtgggtttcctaaatgtcactgaactgtacacttcaaatggttgaaatggtaaattttatgttatgtatgttttaccacaatataagagaaaaagagaaggtggagctgacattcagacttaggacttcctgatgacgcctcctttccctatgctgcatccagacttcttctgctgattttaaagggaaaatctccctgcctaaaagcctctaagaaaccatttttaatcttcgcagtgggggcgggggatgtacagactcctttgagaagctaatgaaaagttatcatcgcctatcatctccccttcctattccctcccccataccttcacatacactttacatttttgtttacagttctggagaatcatgaatcttctgaagtcaaatatccattgttggatggctggacaaacaaaatgtagtatatactacaatataccttctcccctaatggctgagaagagaacatctctctctaggggatcctctagccacaaatgtggaagcctcctcacctgtcagttttattctccctttggggttcccttacatgcacgctcacctgatggcgggtgttgtacaccttctccgctgctattgtgaagggcatgtgcagcagagaaaggagggtgagtcgaggcgatatgctgagcatgaagccatacagccccaccactttcaccaggcttcgcaagagcacattggcatttaaaggaagccagttactcatcagggtggtatccgagctcagccgtgagttcagctcccctaagaaggacagagcaggtgaggaaaaaggaaaccatgtgtactgcagggcccccagaaactccctcctgaccgttccctctgacacagccccctcctctgaacatcctccttcacttgcagagggacagtggaggctgcttctccaccctgtcccaaacaagagaaaagcatccccaggtcctggcatacgggtgaaggcaggaggagaggctgtgggtggaaggtcactgaggggcaagggatgtccatgggaatctcagacctggactccaggccccacctgtcttagtctcctggaagaaaccgaggtcctggcgcagcagggaggagaaaagctgctcccggatccgcaagttgattcgagacatggtgtaggtgaagcagcctcctcggcagcctgcagacagtgagctgtggggtaggagaataagaggggagggagatgcagagaaggagcaagccagcgggtgaaacagaggagcaagccaggagtgcagagaagcgcaaagtcaggggaaagcatgccaggaggggcaaaagagaaagaaatgagagacagacacacagagagagaagaggtaaggaatacacagaggaagaagaaagaggagacatggtgagctagatgtgagaacaaaatcataacatgtacaaatttacaagtatttatggagtgcactctgtactagacacaatagaaaactacaatagaagggaaaagatattgtgaaaacaagtatcccagtgcttgcttctgtcccagcgtccctcaggcttgtccctctgtgcgtctcctccgccttggtctccttcctgccccatacccaaagcccttctctgtcatcatagatacttcatcatgggaactgcaataataaattccctgcccccacaattctctggagccccagagtcatgtgattcccatctgtcatccttcgagttggaaaatccctcttagaccaactacatgctacagtaacacttagaggaaaaaatataaagcataaaagcatgtattttacaaaatatatgtttctaatacaaatttagttaccatattgaagaggcgtttggaatagtcagacatgatataatgagggtttgtactttaatgacagggatgtgttctgagaaatgtgtcgttagatggtttcatcgttgtatgaacatcatagagtgtacttacacaaacctagatgtcatagcctactgcacacctaggccatgtagtttagcctattgctcctaggctacaaatctgtacaacatatgactgcacctaacactgtgggcgactgtaacacagaagtaagtatttgtgtatctaaacatagaaaaggtacagtaaaaatatggtattataatcttgtgggtccaccatcttatatgtggcccatcattgacctaaacatcgttatgcagtgcacgactgtagtttcagcagaaagcagccaggatggaatgaaggcacaatgaaatggttttcgagggtactctaaattaagtatgaccataaaaatagagacaatcaggccggctgggatttgggtaaggtgagtgcacacctccttaaactttgcaccccaggtgcctcgctcacctcatcccagtcccagccttatcaaacagtttgtttgtttgagtatgtctagaaagagaaaggaaagcaagtgaagggaaaagagtaatgattctggaaagaaaggtgataagcctcagagtaagatcttcagggattagcaagatgagctgggaaagaagagtgagagggagaagcatacccatcctgagagagtgaccctggagagatactttggagacagacttaggggtaggaggtaggaggcagaaagaaatggaatttcatggacctaggaatgttgagagacaactgagagacattccatctgagacttaaattccttttgtactaccttcactcataacttgttcctataataagatcagataaactttgaagatattggatgaatatgaacgaaggaagaaatgaatggatagatgaaacagaatggtgactacattcaccatattttagtttaagtatttttgtgttttgcgcctgaaagggcctagaaatggagttagggaagtgaagacccctataaagatttggggctagcaaatggacccagctgcccaccacctacctgccaaaggagaagaggcacatgaagaagatggcactggcaaaggcatgggggtcaaaatcacctcccaggatgtcaatcacacgaccagaatagtgagggattaatgtctcacctgaaagaggcatgaaaaataacacaagaatgtgctggtgcccaggcccttttaccacctccaactcacaacgtcctctcctgactcacccaaaacagcaaggacaaggaagaagaaggcggcaacgaggagaggcaggtccggcctggagagcttcagcagcctccacatcaagactttgttgttcacctggtcctgctccttctcctgggctccaggagggctcagaacagcccacagtgaccagctgagccccgcagccccgtaccccaccagcagccagctccaaggggctgaagcgactctggctgggggagcacgtgaggcccccgcgaccagggctctcagggagacagtcaggggggtggccagacagagcgggagcagcagtgtccccacaaatcccagcagccctcttagctttagcagcccccacagccctcccagccgcagggtcccctccagccatagtcctggcagcccttgaggaagcaaagtccccagagggccctgaagcagccacagtaaagccgcgtccaccagcagcagggaggtccagggtctcaggtcagggagccgcatggctctgtcaacggatacgagatgagaaatcatgggggtggagtcccaatccttgtccctgccctcctacccgcccggctccgcctaacccgtccatcggcttctcattttatcctattcaaccctgagagctctcctgagtaaccggtgctcatccgtacacccctcctacgacagacagctttcggccttctggggagctggaagcatgaccatcaggagcctcgtgcttaaaaaaaaaaaaaaaaaaaatccccggacccccacccccacccccgcctgccgcggcgagctaagtggtccgggctccgctccctcctatcgccgggtgcagagggactgggaagcaggagcgtggagtgggtagtcacttgggctgcgtccctgttggcgctccaggttcccctccgcaccaactcaccagccgcggcggggagaccgcagctccggggacttctgcttcagcgctgaggtccgctccgtctctcccaacctcgctaccggctctggtccgccagctacgctcggccagggcgggcgtcagggctcgggcagctttcgctttcgcttccccagccaaggccttcattctgggctgggccgccgggagggggcgcgcgagacccgcagacagcggaactggagcccgaactctggttcgcactgtacaggcctgcaatgagtctcactcgcctttagtggcggttactctgggatataaaactgcaaaaatgtttctttatcattaagtaaaatacagttgtctcaagggcaactttatctgttgtccttgctttgtaattggagaatgctttgtaattggagaatcactgaattttctcaaagttactacttcaagctctgagcctactattaagaagtgccttctttctggtccggcgcggtggctcacgcctgtaatcacagcactttgggaggccgaggcgggcggatcgcctgaggtcaggggttcgagaccagcctggccaacatggtgaaaccctgtctctactaaaaatacaaaaattagccagggcgtggtggcggacgcctgtaatcccagctactcgggaggctgaggcaggggaatcgcttgaactcaggaggcagaggtttcagtgagccgagatcgggtcattgcactccagcctgggcgacaagagtgagacttcgtctaaaaaaaaaaaagtgccctcttccatgcaagctccagttttaggcgagcgagccgggctctcctaaatagaaggttccaaccaatctcaccaggccaaaggggattttcacgtacagactttgaatttagtaggccctgagcgttcatcttcatccgtccttctcagccggagcaccttgagctggcgcgtgttcaggtgcctctgagtctgtactccaaattatgttgggcgcaccttcagcctatgagggaaatgccccgtactgagctttggttcttgttctattttaacactgtttagaacagtaattaggtttttaaatatccttcctgacccagagccttcctatgcaacagaaagattcgtttattccagaaaggactcttcagattgaaaccacctcccaaactaaaaacaaacaaacaaacaaattccccaaaggaagggtcgcttggattccagatcaccattttgaaatgttacctgtgtgactaccaaggagtcacttaaagtttaaaatagtggtggtggggaggagggattttaagtaggggctcgctaaagttttacaactctattcattctggcattttaagaatctctctctaatgaaaaaagctccatgctcaagctcatgctcctactttcaagcatttgtttcctttattttctggaaagtgacatggtccatagttccagcatgattccgaaaatctcatgatgtgtgtctctttcttctaacctggatcttttacattttccccacactcctcacttaggggagtcctcctgatctcttcttcctctaaaattatagtcctgccatcttgcaattcagcatgacacatcatgaaattagacccttaatgtctgtctttatattcaatatccaatatctccaaagtgttatttgggataaatggtatggtgtttatatgattaccatattaaagtgaagtggaagctttttcatcctactctataaagtcaaaaacagttatcctaggtgccctactccctgttcctcaaaccattaacaatggaacacacaggagtccccaggtgcctctctatggaaaggaccctaacctatgtgaaattgcaaacaagtgtccatggacagcaatgagcagccttcctgaggtcttggagagatgagtgtggaaggaaaccccaggaagaactatgtggtgaggccacatttcttagataggggtctgagccccttctccagaaaaagcgtctctttactttctgccccacccaacaaccacaggcccaaccccattcagccacaagacagaggtatttataaccgtttttctttattctacttagtggggcacccagaaacttccctgggggaaatgcttgttcaaatagagaacacgcagaagatgcacttcaccggcctcctctggctgctgagcccgtactctctctttggctcaggctaggcctcttcttctccttggacttaacgtggcttaggtccctgagtcggccaagacctcccagaggagacctgcccagctgccaccaccaccattattgattggcttcccggtactggtgcagcaggtcactgacatctgtactttctactttcacccaaccatcttccttcatgtggtacactgtggacaaatgagaaaagaacatggagtcacctttcacctcagcaagttcctgtcactgatgttatgttgaaggcagcaacaagacacatgcgcaagcttaaaaccatatgactgggcctttaatgcccttcttctgactctgaaaatttcctccctactactctccctcctttgagtctctcaatcattttcttttttttcttttgagaaggagtctcactctgtggcccagactggaatgcagtggcgccatcttggctcactgcaagctccacctcccaggttcaagtgattctcctgcctcagcctcccaagtagctgggactacaggcacccgtcaccacgtccggctaatttttgtagttttagtagagacggggtttcgccatgttggccaggctggtttctcaatcttaaatcaccccccccaccacccgccgactcctcccaggcatggtggtgggagcattggtctcttactattgacaacgcctccagaatagctgtctctgtgagtggcataagcaatagccctgcggccaaggtcataggcctcttcagggctaagattaggccgatagccactgtccatgaccccgtaggcataagtgttcccactacccgtggagaacatatttcctgagagccgagtcccatgttcatccacgtagtagagtccaggaccctataagatgaaagatttcaggctgaaattggagaggaagatgttggtaacatgggggttcaaatatgagacataaaaagtgaacaaaagaattaatattaccacaagaacattggaattaggaaaccactttggtaaagtcatcgaactttagaaatgaaaaaggaaaaacaaacttgaaatcaactgtttaacaaaagggacaagcttacaaaacacatgcaatgattcatatctgggccaataaatagtccatggatatactgaaacagttctataaccaagcactctatatgccatgcatcttgtcagggagggagtaggagtatatgatgggaaacagatctgtcatccatagggaacatggtgggggaacatgaagaatggagagcacccaccttcttatcccagccacagatcatactgcccatagagaggcccatgccccggtactggcacatcatgttggacagcagcttggaggctgccgacactgaaatacgttctccatttcgcagatagtacagcctgggtgaggacaaggtggagtgaggaaagagaggttagctctttccaacttgatggggcaggaaatgattaaagagataagcattggaaaggaattattttgtaggatctaaagatcagagaaagatttggaatttaaagtatctgaaacatacaaaggcagcctagtaaatgatactgtcccgccagggtggatgtgtcagtgctaaatacctgacgtactatctggcttatgagtggagcacaggctgagatttgggagaagggtcttatcaccaaaaagctgttttgtgaaatatactattagcactaagatggaccacataggacaagagtaaggagcaatgatctgagagatccagggattaaccactaggctaagaaaggaagatgagaggcctcgcttacctgcattccttggccagcaggcgctcccagtactgacagtctgctgcacagccagacatggtgccaagcaggtaagggttaatctcaatcaccttgttcacccgtaaggcacctggaagaagatggagctttgggagagaagggatgaccccatagatcccccagtgtgtcctaaatcaatatccacttccactttgttgcagagttggcctcctgtggaaaggagagcccagctccccagattctgcctgctggagcgtatacactcactaatgtaggacccagctgaggcccgagaatccactgctgcaatcactccatgctggaacttgaaggcgagcgtggtggtgccatgggccatctcaatctgaacgttcctttctccgtccccacccagggactggaagaattctgtgggctgataagagaaaagaggttgagaaaggcaatgaaaaattctgtagtaagaggctccaggaaaaggttttagggagtatgagggtgaggagatatgcagaaatgatctaaccatcaataaatgaaacagttaataaccaatctctagaaggaaatggcttgggagaaggaaaagaagaggcatgccagtatcaaccttttccattttccagcacaacagaaatgaaagcaagcacatgttaccattactaaaaaattttgagagtgacttaaagggtttcttccatgcataaagcattcaaccctcacaaaacacgtttagtaacagtatcctcactttacagaagaggggcttgggacctagactaagtgacttgttctaagtcgcgcaacagtgagttgctgagaggaggccagcaggcaaatttcataggtttcccaagacaccacacacctcctatatcatgtgataaccccatgaaaaaggctccaccatttgtgtgtggacaagggcaggaaagttctcttgtcttcctttgggagcccccacctcacctgtaactctttgtcctaacttgcacttcctcctctcaggccccatccccatgtggcctcttctttgggtctggcgctctccgggactgaaggctacccccgaccctgtaccccgcgctcccgctctcgcctcctcctctcaggcgaccctccactcctcagcgcccgcctccctgcatccctaggggcttccctactgccccgacctgcattccccggggtaaagcgagctctggagatcgcatagagaaactgtagtgtcctgggtccgagcgacgcccgcttcccgcaaccgggagagccgattccggccgctgccctcggggggctccgcatacatctagtagcgccatgaccgcccagcacccagagatctgtccgctctcggaggaggaagtgaaagcgaaagccacagatcgaaggggagggaacaagactcttttccacatccccctgccttttccgagaaaaggacagttagtgcctggaccaggaccatcacactggggaccggcttctctgctctcccgttatgggggtcgggggaatgatgggtcaagggtcttccgaagaaagcgagaaaggaacaggcgccttcaaaagcccacttggcgatgggttacagtaagaggtacctccaggcccgggcatccgctggaaacaggggtgggtagggtcgtgtcatctaaaggcgcagcttcaaccagaagactagaagtcagccaggagctgggagtagtgtcacgcggggtgggggttcctatgagcatcactttacaaaaccaggagggacggaagtgcgagggggcagagtcttggaaacaggtcctgggccaactgcaacagaatatacccgccgcgtgtaggggaaggcggcgccagggagagggcgcagtctctgaatctttccacggggtccatcctagggcccctccaggttcaacggtctcctaacctgtagtcacccacaagagcgtgccctttctgcccgcccttcctagcgttgctccctgcttggctgagcactgcggagtttcacgcctctaaaccccgcctcttcttgcaacctgtgttggcctcatctacccagcaactgtcgacgtcacacgacctgggcctccctgaatgggagatatttactaggcaatcccgcctactgttctgaggtttcccctccaggtgcagcttcagagccaggcgagccaggaaggaccagcgggcgaggtggtgagttgtgaggcgcgcccagtccctctgttcccgcctggcacttgctctggccgcgcccgccccatctgccacttcggagaggccacggctctgagctgcggccgctagtgccctgatgggccctgtggctggggtcttgcacattcttgggggtgggcctaaggggataggggaagtggaaggggcctcataggaattaaaaagcttaagggaaaaggtgatgcagttagggggtaaaacattgaggatgataaaagaggagacatccgcagctgaaaagtgcgctgcaaaaggcagtgggccgtttggtgtgccggaaacataagaaaccacagtacaaaacaccaattttattataaatatcaagaacctacagggtgtttatgggccagcatatgccttcagttatgttgaaaatagctgatcatctttccgtacattctgaacatttctcagtttcagagtgctggccacaccaaagcatcagccctggctctaaactccgttacagtaaggaattacaaatcctgtgtttgtactccaggaagtctgcattatcacgaggagcttggaaaggaggtaacacactcaaggcaaatttcaagtaactcatcctggaggcagctgcctactctgcagctgtggttctccaccacagagagaagaaaagggagggagatggagtgcgcaggtctgagaaggctttcattctggagcatctgcaggagcctgcaccatggcccagtagcacccctttttctccatgagctgctggtgggttcccccctcccggatagcgcctccttccagaaagaggatgtggtcagcctgctccaccaggctgaggtgctgggtgatgagaagcactgagcgggagtaccgctcagggctttcgtacaggagctgctccacctgaggaaagacatcggaccgtcagagccggggactaccctcagcccagggagacacctgtgtttccagggctgggactgacctcacaggatcactgctggctctgctaacaaccccaaggacaccaacgtttcccattctgagtacttctccgcaaaccctttgtttcattaaggactgttttacatgaagggtgcaaaagtaggataaaaatgagaaccctagggtgaaacacgtgacagaagaataaagactattgaatagtcctcttctctacccatggacttggcatttttatattcgattttaaggaaatataacttagtagtaaagagatgagcattcaagtcaggcagacctgaatttgggtcaaggctgcgccactcaaaagctatatgacctctatatgagcagcttattcaacctcttttaacctccattttgtcatctgtagaatgatgataaatgcctagctcagaaggattcctaatgaataaatgagtgacagtgcatgtaaacagactagcttaattaatattaatatgattaggatgggctgggcccggtggctcatgcctataatcctagcactttgggaggtcaaggagggaggatcacttgggcccaggagttcaaggccagcctgggcaacatagcgggacgctgtctgtacaaaaaataatttttttaaataaacgatattatgaggatggtcttttccttatgtttcgctttagaaattcagtctataggactgggcgcagtggctcacacctataaccccagccctttgggaggctgaggggggcagattacctgagctcaggaattcaaggccagcctgggcaacatggtgaaacccatctctactaaaaatataaaagtcaaccaggcatagtggtgtacacctgtagtcccagctactcgggaggctgaggggagaatcgcttgagcccagcaggttgaagctgcagtgagccaagattgtgccactgcgctccagcctgggcaactgagtgagacactgtcttaaaaaaaaaaaaggaaagaaagaaagaaattcagtctgtagtttgtagatagtctcttttaactgattctaggtgtctttgcctcgtcttctatctctactccttggggaggcatccaatggaactggatttgggaactgagaactgcaaggactggtttgtataattatgatgttagtaaaactaacagaagatgtataaaagaagcaagattgggtgggatatagccattaagaagatgactgcctcacctgtaactggctgtttgcatccagggcactggtggcatcatccaggataagtacacacggtttccggatcaatgctcgggccaacgccactgcctgtcgctgaccccctgacagctggctcccagcctcgtctacctctgcagagcaaagggccaagatgagaacggtatagccacatgtgtgcacgcatgtacatgcacacagacacactcatgcattcacgcactcacacacaccaagatctgacggttgtagctggataggggagattctgggaagatgaacagaatcctgaggatgtcaggatgaagaagccataggagcatgatcttacaacttcaaattgatgtccatgagtaaggaggaactgaaggataaaggcaagactactggggtttcagcaaaggtaaagatggctgggtggtgagatgagtggagagagtacctgtgtcatagccctgagggagtccagagatgaaactatgggccccagactttactgcagcagctgtgatttcctccatagttggcttctgggtcaggccataggcaatattttcttgaagacttcttccaaatacctgtggctcttgtcccactgcagccacctgagatgaaatatgatgaagagtcatagaacaaggcacatgggagtatggttatctagagatcgaagactcaaaatctttattgagaacatgtcacaaaatcatactacctccctcctgactacaccaccatctccacccaaggtctcttatcattccctaacccctctttcagagtgctcagtaagaatgctcttcgtatttgatgctccctgccctccttcaagccacctgcttccatacctgcctgtgcaggtagcggtgctcatattggggaaggggcttcccatccaacagcagctgtcccccggtgggctggtacagattctgcagcagggcagccactgtgctcttcccagacccattgggtcccaccagcgccgtcacctcgccagggcgtagggtgaatgtcagcccctagaggccagagaagcacacgataagaggctaccaaggcctctaaccttgagagtgtcattgccttgttacatagcatgatgtcttaccccagaagaaaaacagggaaatatagaaactcctaccctcccacatgcacagatttctgggtgatgcctccccaaggagtagagatagaagaagcggcaaagacaagggcagagacccagcaccactatgccacacacttgatgtcagataccaccaggaaagggaaaaatcacattccaaattacaaaggaaaaggaaagatggaagaccgaagacacagattttgctgcagcaattccttggaacgtgagagcactctcttcgaaacctcttctctcattctctttggaagcccaaactgggttcttgagtttggggaagatttatggaacagatgatgcctaccattgcctttaaagggttagggaggatatatgcttggcagtaagcaggctgaaggcaggaagaaaatttaggatggcagaattgcagttggggccagtggaatacagggagtggtaggttgtacctgtagcactaagacatctgggcggtttgggtaggcaaaggagacatcttggaactggacaaggccctccaagtgtaagggagtcaacagaccactgggtgggcagcgaggggtgcggtccaggtactcaaatattttctctgaggagcccacagccttctgtactctggggtagatggagagcagtacctagagggaggtaagaatagtgaaagtgaggtagtctgcttgccagcattatgtgaagcaagaagggtaaagaatggaaggacatcacacagatggtgctgggccagaggaaggaatcacactggggagtgaaggtggagggacctcacctccacagcctgggtgaactgcatctggtagagaacaaatgtgacaaggttcccactgcttacagccccactggtcaccagctgcccaccaatgtagaggattcccactttcagcagcatacctgaaatctataaagagaccacaaaaaaagggactgaggtagagaaatctggaggggacacaaagaaccacagtcattaacctgaaggaaatatcaagtccctgtctcctaagtgacatcggcaggctcaataggcagacaggagaatgaaccagagaccccatggagtctgactcaatgcacatcatgcaagtcacagttatcttcaccaccatcaccactatcaccttgtctggggagcattttactcttcacaaaaggctttcattcatgtgatgtcagctaatacatgaagagccttataaagaaggttatatcactccatttttgaaaaatgaggaaacaaccagtcgggcgcagtggctcatgcctgcaattccagcactttgggaggccgaagtgggcggatcacaaggtcaggagattgagaccatcctggctaacacggagaaacctcgtctctactaaaaatacaaaaaaaaaaaaaaaattagccgggcgtggtggcgggtgcctgtagtcccagctactcaggaggctgaggcgggagaacggcgtgaacccgggaggcggagcttgcagtgagcccagatcgcgccactgcactccagcctgggcgacaaagcgagactccagctcaaaaataataataataagtaaaaataaacaaacaaacaaacaaataaataaataaagaggaaacagtctcagagaaggtaaatttgttgtcatgatcacaagacaagtaaattgcatcatcaagccaggatcttcggatcactggcgtagctctctttccagtgcatcacagatgtccctcatccctggcttccactattcccatcactctcactaacaaatctacaaggtaccagcatgaagcagtcccaggtgcaagaatttatggcgccctgcacttcccctgagaggcaaaggaaggccctaggactggaagacacgcatctctccaatccacatggttgggtggattttatgtaccatactgaaaggaagccacctagcatctttaaagagagggagggggctagggacactgagtagagtcattgagcctcaggttgctaggacgaaaatactgaaccaaccatttcccagtaaagaaggagtgggagcagggtcataggaatgggaatggagtcacggcatcttaaggacaagggaatgggtattcatcttcaggtgctcacactagtggtccaggagttgactgcataggccacagcctccttctggttgagtgtctttatttcttgcagcttttccctaaacttctgggcttcgccctcctcgttggcaaagcttcgaactgtaggcatggccgacagagcctcaatggccacctggctggactttgccagagattcccgcacctgcacttccagcaactgtggatacatggacaagagatgtcacacgggttggcaaaccatcagggacactaatacctgagttacctatttggaaattaaaggtgagaagagacagaggaaaaggagaaaagagaaagagacacagctatgccccttggatgctaaagaaatacgaggaagaggaaaatgactcagaacgggttggggatcaaattcttaaagacagattgtggggagaagctagaaaagaagacccagagagtatggaggttaatgttgagcaacctgggaacatggaccacagggacagggtgttccatgaagatggagaatcagtaagggtgccaggaaagctggactgaaagcaatgtgagaggaactgagtctgccaagtctgggagatgagggtctgtgtagagcgggccaactccatgaacatacctggtaccattttcccaccttcttgggcagaaggaaaagcagaggcagggtgatcagggtgaccatggtgagggacactgatccccagagcatgatccccaagagacataggcctcgcaccaggtaccacagaaataagctcagattctcactcagagaatcactcagggtggacgtgtcctctgttacccgagacatgatgttacctgcagggttggggagaagagagtgaggtgaatcagacaggttccaagtgatgagacgaactaacaatgagccaggatgccagggtcaggggtgtcaacatggggttctaaggaggctgcaggaaacaaggttagggttctccagaggtctgcaaatctcagtgcagggaagatgagtgttaaagaggaaaggcctgaccttcattttaattataaagtcattaatgcacatgtgaatttccattttcctgaaagctttctgttccctagagaacctgtatgtcccatgctatacacacaggcaggaagagcttaaactggtcacataacagagatggaggaggagggtgctgctaggaagcatgccaaagtctgtggagcactcactgggactagggttctaaccccaggtctatctctagccatatgtaactgtacagcttctagtgctgctagaaagcatgccgaagtctgtggagcactcaagagaccagggttctaaccccaagtgtgtctctagccatatgtaactgtgcagtttcagcatttagggtcttggcctcagtttccttctctgtcagatgaggcagttggtctctatgagctcaaaatttccaggtttgaaattctatggtttctatctaaggatacataggaatagatttataagaaaatgctagatgaaaactctaggtttttcttaaggtaaggaggacaatattttgctcctgaggtatatcaagaatgagaaaaacaattgtgtgtgtgtgtgtgtgagagagagagagagagagacagagacagagagagagagacagggagagggtatatcaagaatgagaaggaacaatgtgtgtatgtgtgtgtgagagagagagagcggggaggggggagatcaaagcagatgtatgaggatatgaacagtacatggcgtataatgaaagagtttcaggagaaacctgtctggttctgttggaaaaactccgtctcctggcgcaggacagccccaaacacctctccctgcaagtggctgtgcacgtggcccatggtgttgttatagatcccgtcacccacgaactccagcactgcactataaagaacccggaaaaaaaggggatcagggtgtgttcagggaacagactgaaggtcccaggtatccccatataagtgcatttcggacagcagccccaacttccaactccctcatttgcagggtgccccattttcagcccccagacctggctatggtgagaatggacatgagagttaagtttcgagtgaaggtatcggctgagccatcttgtagaatccagtcagtgaggcggcccgtaaagaatggaatggccatctcccctggagaaagagaagagaggtcacgcacaaatattaagtctaagtaggtcagttccagtcagactggccccaccacgcctcctccccctcaccattatcctggagggcatcagcagaaaggaaacactgacgtctcaatcccgaacctaaataggctgccctggaactcactaccctgtggttgctctaccagaactttcaggattttattaggaaggctggagatcatgaagtagaaaagcctcctgttagagatgaggatgccccgcccttcggccccagagcaaaggatttccccgcttccggcgtggcccaaagaatcaagacccggtcagcaatggagcccagaacctctggcccccgccagtccagtgccgtttcttctacaccgaagtggtgttccaagacccacgctaggagtccttctcccgctccacatttcccagaacccacgctactctaccttactgacaattacctttgattcctgtcccagtccccttgtgtcctcccctcttgccctgcgttccccttaccaagagaggagaggaccaccaggaccaggaacagcgagaggcggcgcgtctccgagcccaggcagcctagaagccgacgcacagggtttccagagccgccctgaccgccgggcacccagaggctcccgagtttgtgccacagggctgctgcgggcagtgccgctgcataactgacaacgaaggcggtagggtgacttccccagtgcagtagcctggtgctatccgcggacccgggggctccccatgagatcagctctcggaacaaggcaagtcccggcagggccaagcccagtgccgcagctaatggcttcaaagcagccagccagccctgggcacctgcgttttcgctcttggagccaaccgttgccctgaggaccccgcaggcccccagccagagcacggcccagcggctcaggcccaccgcccagacccggagcagtggcagcgcggtgggcaccagcagggagaatatgcggggcagcgcggtccggagcagcacccagtcggcgagaagtagcagtactgtccccagccatgcgagagaagctccggggaggcagcggcacccgcggggagcgggacacctagagctagccattggcactcggacgccgtcccggtcccggccgggcctgggactctccgcgccccggtggggcctgaagctccgggtaccgccgagtcctcccctactggcggctgggggagggaacgagggcggggctctcggaaagtcccaggaacaggctgatcctgcgctggcgagaagctcagccatttaggggaaagcgaaatcgaaagcggccgcctgctcactagataacgcctacttccaaaagtggcctgcccagactattttggtagcaagcgtggaaatcagatctgagaatctcgggagcagccctggtgcccaattttctccatcacgcacacccttctcgcctctccctgcctcctgcctttccacttgcaccagttttcccaccccagcctcagggcggggctgcctcgtcacttgtctcggggcagatctgccctacacacgttagcgccgcgcgcaaagcagccccgcagcacccaggcgcctcctggcggcgccgcgaaggggcggggctgtcggctgcgcgttgtgcgctgtcccaggttggaaaccagtgccccaggcggcgaggagagcggtgccttgcagggatgctgcgggcgggagcaccaaccggggacttaccccgggcgggagaagtccacaccggggtaatgggtctgggcttgagggttggcagaggggtggaggagatgcagcggccaggggaccctggaagcgcgcgcggagaagtgaatgcagagaccaacgggagcgcagggaggtcgcctgtagcagccagcgcttgcaacccgcaatgagcatagagtatttcttttctgaggggggtcgtctagagtgtccgtgaagggaacaggcacgcgaggctggtggaaaaagcgggtgctttgactcttagctggaagcgtcaacgggaagctactctaaagcgctttcgctttcactctggtcccggacagtgggggctggttaaatcaagaaagggggttggggatggtgcaaagagatgaggaaatggtgccctgggtgaagtagaacagcacttgggagaaggaaatataggcacttattgagaaggaccaactcatcacacagacttttgataaacttgccactgggcaactcttagcccaagcactgataatgggcgttctgtgttaactagtgatgcccttccctagcttgacccaggaaggcctctccttggcccagatgctgccttactcccttccctgtgtcttccctgcccactcccatgtgcccactggggggactttgcttaggatgggcgcctggggcagatggcagccccaagactggctggctggcttctgctctggactactgccaccactcgtggcttgggggcggctttgttagagaggaatagcctctaacttgaagttaaccctgttctttgaccctctattcatgataagtcggtccgtcggaaagcatactcagaggagcgtcctttggggccagagtaacttacggcctggtaagaaagacacagtgaaaccacttataatttgggaaatctcccctcactgccaaatgagcagtggcaagtaggaagtagaagtggaaacaagggataagagttagacctgaattttagtcccaggtctactattaactctgtgtgactttgcataagtcgtttgcattttctgtgacttggtttcctcatttgaaccgaggatctttaaggctccttccaactcaatagtagaataaatgtagctttatcttccctcacttcttcttgattcttttcttgacctggaaaagtcagcttaaacttctcagtcaaattatctcttggtacaaatttacctccctggctgctgagatatgtatttacctcttgatcggaaattccataactgaaacttttattttcaaccatctgtatgtgttccttgctgcttctctcctgccttgcccctggccatgctaaccactgccctcctcgattttttccaatgttcagtaaattggaagagctcacttctgatgaaatggggggtgagagtggaggattgtggaccaaaaaaaaaaaaatagactgaccttgtttcccaagatcatagtcaattactctgtgttgggtctacaccacatctgcacatactatgagcccttccgttggagataattttcacttgcggagctgcttcacttctacctgtaggagcctcatctccacctctctacagtggagaggattccactaggcaagttggaacttagggacacagttctttctgtgttgtatcacagctgggctgtggcattcccctgcagccggatgaagcaatagagaaagtggaaagatgaagggaaaaaaagcctgtactgacagtcagctctggcctgttactgtgtaatctttgagccagtcacttcgcctctctgggaatgtttcttcttctctaacatgagggcatcaaggctgttcttgccctgacattccatattctgtgtctctgcagaccaccatcatggcagtggagtttgacgggggcgttgtgatgggttctgattcccgagtgtctgcagggtgagtaaaagtgaagatgtatgcatttggaaagaagctaatggcctcaaatacacactttccttacccattcatgaaaagactggcaaactggagccttggaggaatggagttgaccttccccaaaagccactatgataagctatttggtgggtgcttgggtctctgaatttgtggaggaggatctggggtctgaatgtgtatgtgacctgtcccagtagtgtacagggatgagtaaaggaatagggtctgagagggggacaggagatagatttttgagggtcttctttccatctgtgcttagggatcaaaaagatgattctgtcaagcagatacctggtttctcatttaccatatattgaactattttgtctcttctcccactcctaaccaatttcctcacatgcaaaatgagtatatggggttaggtcaatattactgacattatgttccatagaacataactctctcaagattgttaatagcaaagaaaattgatgaggcatatttttcttaccttagcattttttgctttgttataaaatctaagcctgaaaaataagcctaattttgattaacatctgcagtgattaataatatctgagatgattatttgcctcctgctttaatccaagcattaaacttcatgctattctcttgtcaaagaaatttgagagacattgaatgatcaccctcaaaaattcctgagttctggttgggtgcagtggctcacatctataatctcagcactttgggatgccgaggtgggcagatatttgaggtcaggagtttgagaccagcctggccaacatgttgggaccttgtctctactgaaaatacaaacattagctgggcttggtggtgggtgcctgtaatcccagctattcgggaggctgaggcaggagaatcacttgaaccagggaggcgaagtttgcagtgagcccaagattgatccactgcactccagcctgggtgacagagtgagactgtctcaaaaaaaaaaaaaaaaaaaaaaaacctgagttttaacttggtgactgttgactccctcctgacagcgaggcggtggtgaaccgagtgtttgacaagctgtccccgctgcacgagcgcatctactgtgcactctctggttcagctgctgatgcccaagccgtggccgacatggccgcctaccagctggagctccatgggtatgaagctctggagttctgactccccacccactagagctcccccaacctgcatgaatccctgtacagtgtgctgttccaggagctggacactgggaaatggaaaagtcttgtttcggctcttgctggcacttgaatctgtcagtttctgcatctgtaaagtggagataatatagtacctcatgagacggttattttgagaaccacattctatatgtgaacacagtttaaaagctgtaaatcactatcctgatataaataatcaggaagaaggtgatattgtgacccaccataatatcaggcagttaccatacgagaaatcaaggtcgttgggacggaagtaaccttatctgcttttccccataagagcagggtccttgcagccaaaagaaagttatgtgggtggggctgagcaaaagagtgagcaattgaaagcttcttaccagttggtggtgtgggactctggttcccctgtacatgtgggagggaggctgcagtttgagctattgcagttacagttttcaggggtcgtttagcagggatgatggtaacagtataggagaatgagacttaaaattctatcaacctttattcctaatatttccctcaggatagaactggaggaacctccacttgttttggctgctgcaaatgtggtgagaaatatcagctataaatatcgagaggacttgtctgcacatctcatggtagctggctgggaccaacgtgaaggaggtcaggtgagtttctcccaaagcactctctcctctgggcttccccactctcctgcagaggaagatggaagtcctatgtcattctagcaatgagttccaaggacactacctctgaaagcatagtactttggggatatgagataccagggcttcattgcagggtgcagagaccacttaatgtctcagtgggaaggaagggcttgatgattctttaacctgaggatccctttcccaggtatatggaaccctgggaggaatgctgactcgacagccttttgccattggtggctccggcagcacctttatctatggttatgtggatgcagcatataagccaggcatgtctcccgaggagtgcaggcgcttcaccacagacggtaaccagccaagtggaagggtacctggggagggctttgaaacatgggaaggaagtagattatgaggaacaggaagagaaatacaggggtggccatttaagttaatgccgggcctggtacacttttaagagtgaaaaggggcaggacaaatgcaaagctcaatggggttcttgggcaatacggataaaccagggctgttctgagtaaatcaaatgaggatacacagtcactgtgagaaccagtggtgtgctaagcacagtggctcacacctgtaatgccaacaatttgggaggctgaggcaggaggattacttgagcccaggagtttgaggccagcctaggcaagatggtgaaaccctgtctccacaaaaaacaataaaaaaaagtaaaaaaaaaaatgaactgggcatagtggtgcacacctgtagtcccagctactcaggaggctgaggtggaaagatcatctgagccggggagatcaaggctgtagtgagcggtgattgcaccactgcgctgcagcctaggtgacagagagagaccctgtctggagaaaaaaaaaaaaaaaaagaaccagtggtgtgctgaggtgtgctgaggctggcttgggaccactcatgagagcggactgttaaatagtcaaggatttgtgaactgcttagctatttgtaacttgcaattcatcatagcgggagcatttacaccacggacatcagcagatgccacatatggaagcctttttgtaaaaaaactgatttaccagcacaccactaaatatgccttcctggaagatgagttttgaggtgaaagtggtagtaggcatatggatggagggggagtaaaaagatttttgaagctaagccatcctctctctccctctctccaacttgaaaccctctgcagctattgctctggccatgagccgggatggctcaagcgggggtgtcatctacctggtcactattacagctgccggtgtggaccatcgagtcatcttgggcaatgaactgccaaaattctatgatgagtgaaccttccccagacttctctttcttattttgtaataaactctctagggccaaaacctggtatggtcattgggaaatgagtgctcagggagatggagcttaggggaggtgggtgcttccctcctagatgtcagcatacactctttcttcttttgtcccaggtctaaaacatctttcctagagaaaacaaaagggactaaactagaaatataaagagccctatacatgacaggtgatcacgtactgaatgattttgaagtagtacaaacaataaaaattctcattccgcatcatcatgcggtccatgatgatgaggccgcaagtgaggtgatgggactctttcctttaaggctaagactgacagataggcaagacacctacacacatgagaattagctaagactatcagcaaactcgcatgtaaaagaattcctttcataatgcattcattcatattaaagggcaatacatgaaaaatgcttaaatattttggggcacttgtgaatttcaaagaataatgacaataaccaaaagaagctacatttgtggcattggctaaatgttttataaattttatctcttaaaattcaaaccaaaaaaccccctgtattcacacctgtaatcccagcactttgggaggtcaaggcgggaggattgcttgagcccaggagttagtgaccagcctgggcaacatagtgagaaccccatctctacaaaaaaatttaaaaattagtcgggtgcggtggtgcatgcctgtagtcccagctgcctgggaggctgagtgggaggatcgcttaggcctgggagtttgaggctacagtgagctgtgattgcgccactgcactctagcgtgggtgacagagaaagaccctatcttaagaaaaaaaaaagaaaagaaaaagaaaaaacaaacaaaaaaaacacccaaccctatataggtattattattacttctataggacacatagaggtttggaaagattaaatcacttgaccaaggtcacaaaataagttctgaggctgggatctgggattcagtcttattatatgcccttcctctaccactccctaaaacttctcattccctcaatccccatatatcatcttaaaatctgcaataaatagccccatacattcgttggcacttaggaaactgttaccagatggctgagtaactgtattaaaacaaatttaattctgcttctatctttgccttgcacttcctgagtgacaggagtgaactctcatatccttttctgtcaaaagatggtgctgaatgatttctaaggtagtttacagttccaacattcaatgccattttgctaacaagtgggcagtcaacaggcatattcaacagaaatactagtaggatctcaggctaaacatacgaattcaaaactctaaaacaatcacatccccctggagtgtaaagaaaaaaatctaaaattacaaatgcctggagttgtttctagccatgatatttaacttatttgagattttaaatagcccatttttcccactgatcacaagtagaaattctgggcagtatacaaaaagcaagtactcaaggactccaaaaagtaaacaaaagcaggtggattgtgaagagggtcaaaactgggagaggggcccctcctggggagtgggttttcaatgttttccccttttttcctcccagctctgccctgacgtcaggcctcaggtgcagagctgcactgcgtggtagcacaagccctgagttaacaagagaaataccggctttctggccagaggaatgaagaaaaagggcccctgcgggcaggaatgtgtaggggaatctccaaactgagagtacaggcggaaattccctaattctgagtctgaaccctcaggagtaccaggttacccctgagctgcacatgcgtgtgacatgccttaagggcacagcaaagactttgagaactgaatgaagattagatcttttaaaattggaagacttcggccaggcgcggtggctcgtgcctgtaattccagcactttgggaggccaaggcgggtggttcacctgaggtcaggagttcgtgaccagtctggccaacatggtgaaacctcatctctacttaaaatacaaaaattagctgggcatggtgcctgtaatcccagctactcgggaggctgaggcagggagaatcgcttgaacccgggaggcaaaggtggcagtgagccaagattgcgccattgcactccacctggacgacaagagagaaattccatctcaaaaaaaaaaaaaaaaaaaaaattagaagacttcatttttctgtattggccaaataactgttctaatgcccttcattccaataaaaggtttgtagcagcttacagagataatttaaaacaatttttaaaagaagaaaacaacactgggtcagagagaaaatatggttaagaaaagtaagtgaagccaaggagtgaaactaatggaaactaatggacaacgtgaatatcttaaaaaaaaaaaaaagtggtgcgctgtcttatactggctagcaagagcagactgcaaagtattcaggatttttgaagacagttgttaactattggtaacttgatattgaccactatggaagtatttatactatagaaatcagcaatgctacaagtcagaagcattgtttttcttcagagagccggtttaacaggacacatatttatcagccaactataaatggataaaaaataattggctccaggccataggatagtgaaagcaaagaaggaaataaaatgaggtacaagattcataaaattcattttttaaaagttgccagaaaaccaaaaattatatataatagttcaagccacacagaacatttactcaaataggacatgcatcattccataaaggtaacgccaataaattccagagtatcggtatcttagaaactatctatattctaggccaggagcagtggctcatgcctgtaatcccaacattttgggaggtcaaggtgggcagatccctagagcccaggagtttgagaccagcctgggcaacatggcaaaaccccgtctctacaaaaaatttagctggatggggtgcacctgtaatcccaactagtcagaaggctagacgggaggatcgcttgaacccaggaggcagaggttgcagtgagctgagattgtgccactgccctccagcctgggcaacagagtaagacactgtcttaaaaaaaaaaaaaaaaaaagaaaaagaaagaaagaaactatattctgcaaccatactgtaataaaattagaacttgataactaaaatatacttaaaattgtaagtgaacaaatatatttatcagtaacatggatttaaaaggcagtcgtggatgggagcatcgctggagtccagaagatggaggctgcagtgaggcatgattgcgtcactgcactccagcctcagcaatagagtgggaccctgtgtcaaataaataaacagcagttataaagaaaattaactcttttagaaccaggtgttaaaaatgttacacataaaatatacatataaaataatattataatttcaaatacatttattagaacaagaaaagttaaaataaaggacctagaaattctactcaaaaatttggaaaaagagaagttgagcaaacctaaagaaatacgaagaaaaggagttataaagataagaatagaaagcaatgaaacagaaatagagaacaaaaaactaggtagtgaaaattaacatacttttgattccaaaagctgcttacttaaaaatatttgtaagatattcagagttacaacaaggccgattatggataaagggagaaaaaatgaataaacaaatacataatgaaaaagggggaacagctacagatatgacacagatataaagcatagagtgttatgaacaagtatatgctaataaatttgaaaacctaggtgagataagcaaattcctagaaacatttaatctatcaaaattagcacaaaaagaaatacaaaacttgactataccaatgagtattaaagcaatttttaaagttatcaatggcatctaataaaaaaatatatttttgaaaatgcccagatggtttcacagatgagttctatcaaacattcaaggaacatgaaacttctatattatatactttttccagaaaacagaaaaaaactaaacctgattagctaattttatcagccgagtgtaatcttgactccaaattgagttgtggaaaactcaaggaaaaaaaaataatagacccatttcaccttgaacacagatgggagaaaaaaataattatttatgaaccgaattcaacaatattacaaataataatactgggaggccgaggtgggaggatcgcctgaggccaggagttcaagaccagcattgtcaacatactgagatcctgtgagatcctgtctctacaaaaaattaaaaaattagccaggtgtgatggtgagcacctgtagtctcagctactagggaggctgaggcaggaagatcatttgagcccaggagtttgaggctgcagtaagctatgattgcaccactgcatttcggcctgtgcaacagagcaaggccctgtctctaaaaatatgtataataataacaataataataatgattatgctaataatgatacatcaagatcaaatagggaatccttggaatactagggtggttcaatataataaaacatattgttgctataatttaccatattcatagaaaagtcatttcctttgctcagtctattaataaaagacatttggtaaagtatatccatttgtgatttttgaaaaacagttaaggaagcaggaatcaaaactttcctattttggcaaaggttataatccaaaaaatctgtaaccactagtatacataacggaaaaaccttgggtatccaagacaagaatgttcactataattactagcttatcatagcactaaaaactatgggcaacataacaagaccccatttaccaaaaataaatttaaaacattttaattagctggcatggtggcatgcacctgtagtcctacctacttgggaggccaaggcaggaagattgcttgagcccaggagtttgagcttactgtgagctgtgatcacaccactgcactccagcctgggtgacaaaggaagaccgtatttctaaaaaataaaaaatacaaatacaactacaaactagcactagaccaacagtgactatgtaccatgaactgaggaatattattaattccaccatttgcatctgaggttaacaatatgtcaatgacttaaataacatcatatctctgagagtaatttctcctatatttccatgacaaatgttagataattttccattttttccattcaataaaataaacaggaaatataattaaagagttcaattgaggattgggatttagaaaggaaggcaggaattaagaataatccttagttctcttcctaatttgcacctctctcactgatacatatgtattattttctttttatgtcttttagaatctaataaacatgttttatattatataacaaactagaatatatggattatctttggtcttccttaccaagttcttaactctgctggctctggggcactggacataccatgtaagaagaaaaatgttttaactccattgaacttattcagaagcatcggaaattggttcagcaatattcaactttgcccagcaatgtttatgaaagtttcatatatagtatagtataagtatgtgtaatacagaatttatgttctcaaaaatgaagagataaagtatggagattctaaactctgttgacatagaagagggtggatttctcgaagaaacagccttctatagaaagtggcttgtatgagtcgggattctccagagaagcagaaccaataggatgttggcagagagagatttattttaagtaattggctcatactactgtgggagctggcacggtcgaaatctgcaggtaggctggagacccaggaagagctgatgttgcggcttgagtctgaaggtggtccagaggcagaattccctcttccttggaggacctcagtctttgcccctaagaccttcaactgattggaagggccacttacattatggagggtaatctgctttacccaaaatctattgatttaaatgtaaatctcatctaaaaaataccttcactgcaatatctagactggtattcaaatgtctagaaaccatagcctagccaagttaacacataaaattaactatcacttggctcaaggtgaaacttccagatcaatgtggcaggagtgttgaggaaggaagtgaactcggttctaaccaagtaggacagccgaatcatcactgaagtgtggcactggcctttcgccaaggtaacatgtggcaaggttttaggttaggataggtaccaggcaaaagctgggtgactcgatggaggcttttgtgccaaccttcagagactggctgcgtcagactgccctcaagagcatacaaaggaaaaaaagacaaattaaaagcctttaatccaaactcaagacatgaatgaaaaactgtaaatgcctctatagcagttttaaaggctatcttttctcctgcaacccagcacagatatggctgagggtcaagcccgggggcttatgataaaggttatgaagttgtagaaatgtttgttgcatcatccaacagcagctgttgtgataaggcaagacccctggttgggatagaccggaccctgagatatgaaatagggacatatgagcagacacagagaagtctgagtgagaactatgaatcaccgcaccccctgagggtccttgctggaagaagcagactcaccgtattagttacctattgccatgtaatgaatgacacccgcttaaaataacagacatttactataaggtgttactgggacaataggggattttttaatatggattgtgtgtttgataatatggtatcaattttaagtatcttgggggtgatgacagtattagggttttgcaggagaaatgtccttattcttaaattatacatgacaaaatatttaggggtcaagtggcataatttccacagattactctcaaattgtttaacaaaatggttcttcaacagtaaatggataaacaaaacgtagtctattcgtgcaacacagtactatgtaaacaatgaaacttcatcaactactgaaaatgtaacaacatggacgaatctcatagaaacaatattaagtgaagaagccagacttgcagaaatacatactgtatgtttccattatctattgctgggcagcacaccaactccaaacttaatggcttaaaacaaaaataatcattttattatctctcatgaatctgtgaattactggactttaagagccactgatgtagtccatgaaccaaaacacatattcacggcagccactccacccagcacctcacacctgtgatgtttactggctgcccatgggatttgaacacctttagagtactgtgaaatttcccctaccttttgagtcctgcctccctaaagtggaaaccagaaagctcacttcccctagccttctttgaagctagagcacctaagttccaccaattaaattcatccacctaagacttcagttacaaaggggccacaggaggaaccagggtgtgggggttgcagagcaccttttactgtatttatttctctggcaaaggtgacagaagaagcaactgtcttttggggaagcggtgggttttttccttttttttttttttttttaagtgaagttcctgaaacagaagtggtttaggaggtgtcttcagtggtggctgcagcaacctccaggtcctaacaacagaaccaacagcagcgtctagaagccatggggcagcagcagtggtgtggctcatcagacctgctctctgcgtggtctgaccctgtacatacatgtgcctctcatccgtagttccagcatttcctctctaaagtctagttctgagagaaatttctttggtagacttttcaaagttttatcaaactcaaagagggaaccagcaagaatacaagagccttgatccaaagagtatttgaaaaacagagctgtatctctctgtgaggaaataatttctaggctagagattcaaaatggctaacgtgctagagggcaataaaatcataaccttggtgttatcttctttaccggagaaaaagagaaagccagcatcccttatcagctctctgctgattaacctctaatcgcacagggctggccgggttcgtcttaggcaaattacaatccctgaaacactctggttttgatcaggcagaattatgagcaaaggttcaagtgtgatataaaataatcaagcacgtacaattttgccttatttataattttgaaacacttttcctacacaatttctgaccttaaggggcagaattaaccaaataaaacttttcagaaatgctctaattcagttccactcattttatcgtctctatttggcctgttttagggctaaacccagaagcaaaatcttcttcaaaatgaatgtattgacagtcaccatgccagacttggagtacgaacaagagcatccttttacccttactgaaacctatgtggtcactaaaacatatatcaataatatttttaacctggacaaaattaatctagaaaattgagctactgttttttatttgtcagcttttaccacattgtgggtttgagacacaggtagttcttttgatagtacagcgttaatttaaaatataaaaatcatgccaaacacatctaattacttttagcttccttcacagtaggcggaggaaggtgaaaaattaagccttttgcgccacctagtggccaaatgggtagtggctgtctagtgagaaaaaacaaagatttgggggcgtgaaaaatagcttgacagtgttagtattctgaattcagggtatgaggttggaagaaggcaacaacaaaaaagaattttcagagaaactggtcacttaagtgcataggtacctgagagtgagcaattgttataactttgatatctcaataaccagagtgacaataaaacatttgaaaataaacataaagaaggtaacaattataagaaactttaggtgtttcagaagcaaatggttttttgttgttgtttgtttttaaaataatttaaaaacttgatgctatcagcacaaagcactaaaagttatcaaggtattaagtgagagcattctgataagaaaccaccgctagctgggcagattatgctaaagggaaagaaaaagttttttctctgtcttaagtgtagagtgtatattccaagatcaattttaaattacaaatcctctccttttttgcttattaattcgaattcatcattacgtgtgtgttttacagaaatacatatatagttgaatgacaattttgtttaaaactttccactttagttttaaaacgtagttaatcttatcaatacaatacatgaatgtatatccacactaagtttaccaccttaatttgagttttgcaaaaattaaatatggacaaaggtatatatatagaaagccacttagtgacccaataatctttctctctatgatacacttaagaattttttagacaataaaaagtcacttattaactagctcagtgaaaattagtccaaagtaacaaaatcatttgaggctgcaaaacaacaatatcactattgatattaggagtttttcaaagaggtaaaattctaaaatttttacatagagtgcaagctaagtagctaagtcaaatgacttgcaatatttttctgaaattcacaagagccaatagtttaaaaaaagcatctcataacatttaattaaaaatatacattttcatttaagtttgcttcccacaaaccactgacacactcattgacacagtgaatgagtctagtgacaagaaacaaatcctttttgttaggtcacttctaacactctgcctccaacaaaataaagaggacctattcaagctgtcagctattatatcatttaaagtaattttgggaaggaggccaggcaggaggatcgcttgaggccaggagttcaagaccagccctgggcaacataatgagaccctgtctctatgaataataataataaaattagtcaggcatagttcgatgtgtcatagtcctagatactctgaaggctgaggcaggaggatcacttgagcccaggagttcgaggttacagtgagctatgatcgcaccactacactccatcttgggtaatggggccagccaaacaccacagaaaaaactgcgactccacccccaccagctaaggtcaaatgaggagcctagactttcaccctcaccaggctgtcataaggaacccaacacttcaacacacacatgcacacacaccaggatggtgtcagagaaagtgaatagggagtcaggatggtcatgccctcttggtgaaaatgtactcctttccccaagcccctgaaatgtcaatggaaacctagacttccattcctcacccaacagtaatgaagcatctcttcccctctcctctagggtgatgtcagacaatgcctaatggagagtcaggattttcatcaccacccagagttaatccagcaaccactccctgatacctaccactcactcctccactccactgtcccatcttggtgtcaataaaggtcatgtgagggatagtaagtggcactcctctcccaaccaaccagggaggtattagtgggcacctaatagggagccagaatttctgtccccactcagtaataatggggacctatctgaggtgtcaatgaaggcagagtgagaagcctggactcctacccctacctggcgtcatgaagctcacctgcctacctgctggagaggtgttaaaagaagccagctaaaacagtttaaataagaccaatagccttataacataatgcctgaaatgtccaagtttcaattggaaattatttgtcatatcaggaaccaggaatatctcaaattgaatttttaaaagacaataaaatagatgccaaaacggaaagaaaagcctgatgaagattttaaagccaccattattaaaatgctttgatgagcaattaacacttaaaagaatgaaaaaaataggatgtccagttcagtggtttaaaaaaagaaagaagaagaaaagagcagaaaagaaaaaaataggatgtttcagcataaaaataggatatatacggaagaaaacgtggaaattttagaactgaaaagtgcaatagccaaaataaaaagcccagtaaataagctcagcagcagaaggagagaacagaggaaagaattagctaccttgaagacacagcaatagcaatcacttaatctgaacaaaagaaagaaagaaaatacactggaaaaaatggacaaagcctcagggacccatggggctataacaaaagatttaatgttcatgtactcagagtcccaaaatgagaggaaaaagagagtgaagctgaaaaaaattatcaaataaatatggttgaaaacttcccaaatttggcagaagacataaacctagtgatttaagaaggtgagtgaaccccaaataggacaaacccaaagaaagccacaccaaaatcatagtaattaactaaaaattaaagataaaaagaatcttgaaagcagtgagataaatgacatctaacaggtgaaaaaaatgacagagcaaaattttcatcagaaactgtgtaagcccgaaggaggtcaccacctttttccagtgctgaaaggaaaaaaaaatatcaacttagaacactatatcagcaaaaatatccagggaaattaagacatacagagatgagggaaaactaacagaatttgtcactaacaggtctaccctaaaaaaacaaaaagttaaattgaggacagttggaacatcaggaaggaagaaagaacatggcaagaaaaaatatgggttaaaaaatggactttacttcttctcttgagttatttaaattataggattgaagaaaaacgtataatactgtatcatatggttataaatgtatatagagaaaatattacaggcaattataaatgagggagggtaaacaaagagagaagaaatttctacacatcactcagactggtaattaatgacaataaataagttacataaatataatgtaatacctagaacaaccactaaaagagctatccaaagaggtacacacacatacacacacacagctatagataaattaaaatggaattttaaaattatttaggaagcaatgaaaaagaaaacaaagaaatgaaaaacagagagaacaaacagaaaacagaaaataaaatgtcagacttaagcctggacataacaatattataggaaatataaatcgcctaaatacatcaattttaagagacagagcttggcagaatagatttaaaaatatgactctgtcaggtgcggtggctcacgcctgtaatcccaacactttgggaggccaaggcaggtggatcacaaggtcaggagatgaccatcctggctaacatggtgaaactccatctttactaaaggtacaaaaattagccagctgtggtggcacaagcctgtagccccagctactcgggaggctgaagcaggagaatctcttgaacccgggaggtggaggttgcagtgagctgagatcacaccacttcacaccgctgcactccagcctgggcaacagagcgagactccgtctcaaaaaaaaaaaaaaaaagactcaattatttgctgtttatgataaactcacttcaaatataatgatataggcggtttataagttaaaggatagaaaaacatatatcagacaaaaaataataaagggaggctatattaatatcaaataaacttagaacaaagaaaattactagaaatggataggaacactatgtaataataaaagggtaaatctaccaaaaagacatagcaatcttaaatatgtatgcaccaaacaacagggctgcaaattatgtaaagcaaaaactgatagaactgaaaagaaaataggcaagtcaacaatgatagttgaagacttcaatagttttctctcaacaattgattaaacaaatagacaaaaattgagaaaaaacatagaagaataaacaacatcaaaccataagatctaatcaacatttatagaacacaccacccaacaacagaagatacattattttctttttcgttgcttttagtagattccacgagattttcctttttcttttttcttttttttccttttattttaagttcaggggtacatgtgcaggtctgttacataggtaaacagtgtcatggaggtttgttgtacagattatttcatcatccaggaattaagtctagtacccattagttatttttcctgaccctctgcctcctcccaacctccaccctccaataggccccagtatgtgtttttcctctttgtgtccatgtgtccatcatttagcccccacttatgagaacatgcagtatttggttttctgtacctgcaatagtttgctaaggataatggcctccagctccatccatgtccctgcaaaagacgtgatctcattatttttatggctgcatagtattccatggcagaatacactttttttttttttttttttgagatggagtttcactcttattgcccacactggagtacaatggcacaatctcggctcattgcaacctctgcctcccaggttcaagcaattctcctgcctcagcctcctgagtagctgagattacaggcacacaccaccatgcctggctaattttttatttatttatttatttatttatttatttatttattttttgtatagatgaggtttcaccatgttgatcaggctggtctcaaactcctgacctcaggtgatccacccacctcagcctcccaaagtgctgggattgcaggcatgagccactgcacccagccagaataacatttttttaagtgcccacagaatatatgccaagatagaccatatctaagacaataaaagaccaacaaattttttaaataaaatcataaagaaagtgttctcctaccacaatggaaccaaaccagaaatcaacaacaggaaaatatctaaacatttggagacaaaacaacacacttagaaatacatgggtcaaggaggaagtctcaaggaaattttttaaaaatacacacaataaacacaactaaacaaaaatgaaaatatgccatatcagaatttgtgggatacagttatagtagttataagaggtaaatttaagttccaggatacatgtacaggatgtgcaggtttgttacataggtaaacatgtgccatggtggtttgctgcacatatcaacccatcacctaggtattaagacaagcatgcattagctatttttcctgatgctctccctccctccaacctcgccccagacagaccccagtgtgtgtttttcccctccctgtgtccttgtgttctcattgttcagctcccacttataagtgagaacatgtggtgtttggttttctgttcctgcattagtttgatgaggataatggcttccagcttcatccatgtctctgcaaataacaggatctcattcctttttatggctgtatagtattccatggtgcatatgtacattttccttatccagtctgtcattgatgggcagttgggttgattccatgtctttgctattgtgaatagtactgcaatgaacatacaagtgcatgtatctttataatagaatgatttgtattcctttgggtatatactcagtaatgggattgctgggtcaaatggtatttctggttctagatctttgaggaattgccacactgtcttccacaatggttgaactaatttacattccatcaacaatgtaaaagcatttctatttctccacaaccttgtcagcatctgttgtttcttgagttttaataatcaccattctgactggcgtgagatggcatttcattgtggttttgatttgcatttgagaagtaaatttaaagcactaactgcatacattggaaaagaggaaaagtctcaaaccaataatctaaactctcacctcaagaatctagtaaaagaataacaaaataaaaagcaagcagaacaatgaaactgaaaacagaaaaacaaaagcaaaaaaaaatcaatgaagcaaagagctggctctttgaaagattaataaaattggcaaaccactagcaagactcagaaaaaaagacgacagaagatagaagctaccaacatcagaaatgaaatgggatatcatcaaagattctacagacatcaaaaggataacaaaagaatactatgaacaattctacacacataaatttgacacttaaattaaatggatcattttctcaaaaaatataaagtgccacaactcactaaatataaaataattcaaaaatgtctacacctattgaggaaattgaattcataatttaaaaactcacaaaaggaaatatttaggaacaaatagtttcaatgaagaattctaccaaagatttaaagaagaattaacaccaattaatctcttccagaaaatagaagcagaggaagcatttcccagtttattttataaagctagaattacctcaataccaaaaccaaacaatgacaatgggaagaaaagaaaactgtagactaatattcctcatgatgcagcaatctttaacaaaatattagcaagtggaatttaccaacatataaaaagaattatatacaatgaccacgtgagagttatcccagggatgcaaagctggttggatattcacaattaattaatgtaatccatcatattataggctgaagaggaaaatttacttgttcatatcaattgatgaagaaaaagtatttaacccactttaacacccattcattatttttttttaatctcagaaatataggagtagaggagatctttctttacttgataaagatcgtctacaaaaatcctatggtgaacatacttgattctgaaagactgaatagtttctacctaaaatcaggaacaaggcaagaatgtccactctcaccactcttattcacagtgttggaagttctagacagtgcaataggcatgaaaaaggagattaaaggcatacagattgtgaagtaagaaataaacagctcccatttgtaagtgacatgattgtctatgtagaaaatcacaaggaagctacagaaaaacttctagatatgtgatttcagcaaattaacagaatacaggataaaccagtatcaattgtatttctacatactcacaatgaacaaatgatacatatatatatattttttttttttctttttttttttttttttttgagacggagtctcactctgtcgcccaggctggagtgcagtggcacgatctcggctcaccacaagctccgcctccggggttcacgccattctcctgcctccggagtagctgggactacagacgcctaccaccatgcccggctaattttttgtatttttagtagagacggggtttcaccgtgttagccaggatggtctcgatctcctgaccttgtgatccgcccaccttggcctcccaaagtgctgggattacaggcgtgagccaccgcgcctggcccaaaaatataaatatattatttacaattactcaaatacatgaaacacttatgtgtaaatctaacaaaacatgcaagacttgcaagctaaaaactatgtaatgctggtgaacgatatcaaagaagatctattcagtctctatctatgtggagagaaatactgttcatggattggaagattcaatatagtaaatatgtcaattctccccaaaccaatatacaagtttaacacaattccaatcaaaatctttgcaagatttgttaattataggtaggattactctaaaatttacatggaaaggcaaagggactagaatatctaaaatattcttttttcatattattatattttattgtagtatgtgtagtgtatactaacttaaagggaaaaaatgtaaacaaaatgaaagacatggggaaaatggcatcttgctttaatcttcaacttaaagttacccttaacaattcatttataccattatgccaaattgtagtcatccctgcagaattttagacaaatgaaaatggacaaggtaacaccaaagagattaagcacagaaagtgatattgattaaaaagttgaaagtaaaatctaccttggctggaactgaacattcagatccatctctagaggaaaatctaacatgaatcatatggttcctattttgactagttcatagcatatcaattagcaacttatgacttgaaaatactttttctcagctgcatttgactacctaaaatcctaccgagcacgctgtttggcatgtcttactcctctgaaatcatcatctactttctaaaaaccagaaaattagtttgcttgtgatttaaaattcaaaaaagtttgtagaaaacacaaaaagaatcaactatttaaagtctcatccttttcttctctctaaaacagctacttctactaaaagaagagtatgtggatactttctaagaactcaaaaacgagaaaaccaaaatcagagggtgcatgaatatatgtgcacaggtatgtacagatttaatctctatattccctaaaacatatttaaacaggtaatcccagcattctaaattcagaaagcaaaaataaacagttttgtttctaaatcagtggtattactagctgaaatgtttagtagaatactgcacctatagttcagcagtactttgattatgtaccatttaagaaatcaaaataataagcacattcttctaacagcaaagaattgtcccactttttattttgacatattgatatttccataaacttgcaagtggaaaataagctgttcaataaaagccttcttacatatataatatacagaaattattttagaagtctgttcatataacagattattttggcactaacaaaaattgtatacaatccatcagttgtatggctagaaatgaaaccatcactaaaccaagacacacagggctttcctgcacttagtttcaggaaaaagttccaagtaattcttactgtgttagaagaataaagtacatttgtcatagtatacattatcatattcccttaaagcagggactaaagtttttaaattaaacaatgtccaggcttacttctgtctgtacattcaggaataatcatatcactggttacatacaattctctcctcatgcaaaaaaaaaaaaaaaaacctcaaaaaaaaaaaacctgttgttttcttaagtctaattaagccaaacaaactattaatagcaatttaattagcaagctataaatcagagaggtataaaaattcagcagttaaactgtatttcccacctatagtactgctgctactcaatcattttcttcatgtattagaagaattaataggcattgatggtcaaaataagaatttcaatattgcagcaaatgacagaagagtgagcgaaagagttcctaatgtgtgacagtcttaatgattctttaaaaggtaaaggattgtatgcatgtgtgtggaaaggagtaggaaataaaagtaggaggttaagacaggtatttaaagggaatgccaagatagctgcattagaatctttattttttaaaaaactgaagtctgcccagagtaccaaaaacattaaaaaaaaagagcagacattggtgcaagtttaacctgtgagaaaaaagctagttttgatgagaaaaagttcagtcttttccttgtaaatacaaagaaatgcaacaggaattttaaaggtagtaggccagaaaatgtaacagtaactcttacaatccttttctttttttttttttttttttttttttttttttttttttttgagacggagtctcgctctgtcgcccaggctggagtgcagtggcacaatctcggctcactgcaagctccgcctcccgggttcacgccattctccctcctcagcctcccgagtagctggaactacaggcgcccgccaccatgcctggctagttttttgtattttttttagtagagacggggtttcaccgtggtagtcaggatggtctcgatctcctgacctcgtgatccacctgcctcggcctcccaaagtgctgggattacaggcgtgagccaccgtgccaggtcacaatccttttcaattaaacagacaaatcaagttgaagacaagtgttaaaatactattcagcctgaatatttatcagcatatatatcctgttgttcaattggcttttggttaaaaaaaaaagtcaacaaactttataagagctatcaccacatttagagtgatgaaaataaattagttccccccccccaaagatattgtttaacctctaaagcatgaaaagctatataatatacaaattaaccagtatttttacaaaagtaatacagttttggactgatgatattacaccgtatttgtggtaaagtactaggcacaagaatatatatatcaattaggcattttcagtctaatcagtctttaaggttttcatttaattcttggcaatatataataactggtatgcactttggtacttaagtcatgacttgtggagaacgagaagcaatgtattatagcaacggggttcatatctaacaaacaataagagtgttgaacaaatcccttctatgaacttcgtgatttattttgctgttggtcacttgcagtagatccttgatttgattcttccgtattcatgctttctccatgtgcagtctctaacatttcttcaactttgtcatcatcgtgtaggtcttttgaaattaattgtctagctagtttgatattgagtccttcattgtagtgaagcgtccttctcatttcaaattgtcgctttttttctcgttcttcaggtgagaggtcactatcctcctctccactgctttcttgttcctgaacctgatactttggctccaagccttcagcagcagctaagttcttagcaagctatctgttgccatagcttcagtggtttctgtatcactacatgcatcttcatcatcacccatcgtactatggtaaggagtgcttggttcatctattttcattaaaccatagtctttgtctgctggacgatatgtcgccaggatgttcatttcatcccacttctgggattttttgctcagctgctcgtggacactcccacggggatgttcggccgacgccaccatagaggaagtcgtagaggtgttgtccttcaggatccccttgaggggccgttgcgaggccgtggaggccgccattgccgggtgctccgcctgtcggctcagggtcgctgcttggcgtggggtccgcgaacagaagggtcggcactagcagagaccagcaggcagacgcggagcccgctcaaggctaaagcggccgcacctgctgcctcggaaaggggtaccggagcggttgtcaagacacaatgaccccgacgccagactcaagcggggaaaagcgggcctagagctccagggcgggagcgacgccgacgcctaaaacattcttgaaaaagaagaataaagtgagttgaaaatcagtctgccctatttcaagtattgttttatagctacagtaatcaagactgtgtgttactagcagaggaatggacacacaaatcagtggaacaaaatagagaacgtagaaaaagacccacacaatctgcccaaatgatttttgaaagaggtgcaaaaggaagtcagtggaagaaaaatagcctttttcacaaatagtgaattgaacaatggtgaaatggaacaattgggcatccataggcaagataataaaataaaaatgaaacttgacctaagtctcacgccttatgcaaaatttaattccaactggattggattgcttgagtccaggagttcaagaccagcctgggtaagatagcaagaccctgtctatacacaaaaatgaaaaataatgttggtgtggtggctcctgcctgtagtcccagctacttgggatgctgaggcagaaggattgcttgagcccaggagttcgaggctgtcataagctgtgacacaccactgtactctagcctgggtgactgagcaagactctgtttcaaaaaaaaaaaaaaatgtcagagaaatgcaataccttaacctttaccagatacaattaattaaaataaataaacaaaatggattatggagtaaatgtaaagcataaaactcttaaattttagaaaaatagaaaatatttgagatataggtctaggcgaagaattcttaggcttgacattgagagcatgatctatgaaaggaaaaactgataaattggatttcatcaaaatgtaaaactgttgctttgtgaagatctggtaagtggatgaaaaaatgagctacacagtaggagaaaatatttgcaaactatgcattgaacaaaggactagtatctagagtatataaagaactctcaaaactcaacaaagaaaacacattaaaaatccaattagaaaacaggcaaaagacttaaggtaatatttcactaaggaggatataaaaatggcaaattagcacatgaaaagttgttcaacatcattagccattagggaaatgcaaattaaaaccacaatgagataatcgctccacacctatcaggatggctaaaataaaaatagtgacaatgggctgggtgcggtggctcacacctgtaatcccagcactttgtgaggccaaggtgggcagatgacctgaggtcgggagtttgagaccagcctggccaacatgaagaaaccctgtctctactgaaaatacaaaagtagccaggtgtggtggcacatgcttgtagtcccagctactcgggagactgaggcaggagaatcacttgaacccgggagacagaggttgcggtgagcagagatcgcaccattgtacctagcctgggcaacaagagtgaaactctttctcaaaaaaaaaaaaaaaaggcgacaatgctaaatgctggcaaggaagaagagatactggatctctcataatttctgatgggaatataaaatggtacagccactctggaagatgatttggcagtttcttaaaaacaaaacaaaaccaacaacaacaacaaaaatccaacaactaagcatactactaccatcctgcccagcaactgtactcctgggtatttagccccaagaaatgaaaacttgcatacacaaatacacaagcacagacaatgccttcacacaaaaccttgtatgcaaatgtttgtctaactgcctactcattgtagccaaagataacccagatatcctttaacaggtaaatggttaaaccaactattgtacacttataccatgaaataatactcagcaataaaaaagaatgactgatacacacaacaacctggatgaatctccagagagttatactgagtgaaaaatgccagtcccaaaaggttacatactgcagtgagctgtgatcacgtcacttcactccagcctgagcaacagagcaagaccccatctctaaaaatagataaagaaacaaaaaagatggattacagagtaaatgtgaagtgtaaaactattaaaattttagaaaaataggagaaaatctttgagatgtagggccaggcaaagaattcgtaggcttgacatcaaaagcataatccaggctgggcgtggtggctcacgcctgtaatcccagcactttgggaggccgaggcaggcagatcattgaggtcaggagttcgagaccagctggccaacatggtgaaacccgtctctactaaaaatacaaaaattagctaagcaagacggcacatgcttgtaatcccagctactcgggaggctgactcatgaacatcactcgaaccttggaggtggaggttgcagtgagctgagatggtgccactgcactccagcctgggtgacagagtgagactctatctcaaaaaaaataaataaataaataaaataaactttattgaaaagaaaaaaaaagcacaatccatttgtataacattttgtattaagaagcttgaaatgacaaaagtacagaaatagagaaaaaattcatagttgccagtggttaaggaagtgatgggggtgggaaggaggtgaaccgaccataaaagggcaagataagggatacttggagtgacaaaaatactgtcttgactgtaatattgacattgacacaaatgtcaatatcctgattgcaatactgtactgaagtgttataagatgttaccatcagggaaactggattaaagggtaaaaggttctgtctgtattatttcttacaactgcatgtcactctctaattacctcaaaataaaaagttaaatttaaaaaacatgtatgaggatgtgcatagtttttcaaaatacatttaagaagttcatgagtggaaagtttgagtgaataaaaattatatctggaattctggtttgcaaattagcctgggaaatgtagcctgactcagtgtgactcagttctataccactgttctcagctctgctgttgctcactgctaacgttgaagccaaatatctcttgagttgcagggcaaccaagatcccatgatccaatgttgctctcactcaccttggcctttgagagagaacaggaaagaagatggagaagaaggattttccctttgccccattttcctctttttgggctgaactgtgtccccctataagttcataatgttgaataaacccagtacctcagaacgtgaattttttttggagttagagtctttaaaaagataattaagtgaaaatgaggttatgaaagtaggtcctaatatagctagtatccatataaaaagagattaggacatacatacacagggggcagtccataggaagatgcagggaaaagacaaccatctgccagccaaggacagagacctcggaagaaaccaaccctgctgacaccttgatctcacatttctagactccagagccaggcggcaataagtttatgttgtttaagccattcagtctgtggtatttcttatggtagccctagcaaactaatacatcctcctatatttggacataggcctgtccttcttgattaaaggaatgtaaaaataagactgttgtcaaagttttaacaaaactttatgaaggcttgggcaaaattgaaaaggaaaagacaatagaaaattcttccattctgatcacagatattacagatgtaagagatcacaggctccagtcatctaagggttctccaactagaaatagacctggtatggctgatgctactaatacctgccatgttccttgggccttaccactgtagtgcacactggctggacatttgcatcattcctgaaggcttcctcaaagccaagaagggccactctgcccgactcacagcagactagaagggccgaagagttcacgtgtcaggcagcagccttcaaccaatgggaattgatgtacaattgcccaactccctccttccgtggctgggttaactctgaggcaagtgctttcccagaatttccccaggggattaagttccagtcattcacccttcgttggctgttttcccttcccaatcttttactcagctgctactgaagtttcatgcacctccaaaataaattactttcattcatgtccctgtgtcagggatgcttctggaagaaaccaaacgaatgcaccccgggttagcttctaatttgcttcacagcagtaaaggtcaacttttctttgcattacccaagagaaaacttagccattacctcatcatggtgcttggatccctagaaccctgtctctcatgaaaccctgattccttcctttccttgtcaagatctttccttacccagcatggatgacagtccattctattgagtactaagaaaagagagtttagaaactgtcagaaatatttttatttcattcaaatttgtaatattccgtagaccagaaacagcacactctttgatcccatccttgtatgcccaaaatatctgagttggaggaggcactgaccctctgtcacacagtttaactggattacagagtgcaagaccccaaaaccagttcctgacactctttctgtcttcagcctgtggattcttatcacttccacagaagaaaattggctctaagattatccggagtacttcccaaatctattatttatggaacaagtgctgacttcagatatctagtaatctaaggtttttcatctccaaagacctttctttcatttggcctctactgggttttctattttatttatttatttatttatttattgagacaaggtctcactctgtcacccaggctggagtacagtgacctgaacatggcttgctgtatccctaacctcctgtgcccaagcaatcctcctgcttcagcctcctgagtagctgaaaccacaagtgagcgccaccatgcccagctaatttttttttctttacttttctttttttttttttttttttttttttgtagaaactgagtctcgtcatgttgtccgggctggtcttgaactcctgggctcaagcaatcttcctgccttagcctcctaaatggttaaaggcatgtgaccatcacacctggcctaccatggttttcaaatgtaaaattttaaatgaaaaatcttaatcttttggtcattgctgttttgctgtggtctgtctcccatggcatgaggggaaatgcgttatctgcctctgttgtagaaagatgcctgaggaaaataatcctcagttgatgtctcaggatttttcctgccatatacctggaatgtgtaaaagcacaggaaatatcctagtataacacaaactacacacagttacctttgggacctagaatggaatggggaggagggagaaacaaaggagaccttttactccgtacccttctgtatggtttgaacttgttgttttttttttatagacggagtcttgctctgtagcccaggctggagtgcagtggcacaatcttggctgactgcaagctccgcctcctgggttcacgccattctcctgcctcagcctcccgagtagctgggactacaggcgcccgccaccacgcaaggctaattttttgtgtttttagtagagacgggggtttcactgtgttaaccaggatggtctcaatctcctgaccttgtgatccgcccgccttggcctcccaaagtgctgggattacaggtgtgagccaccgcacccggccggtttgaaccttttataacaagagtgaatccagatatttactatgtaattttctcatttagtctaatcatttagactaaatgattagaagaaacaggacttaaaaagaaatgaatgaatttccactagggggtggtagagaatcataatccatatcatagtctgaaactgaagggcaaaaggaaatagtcaagttcagaatcacatgctgcagcccatttgtaattataaatctttattaactagctcagtgtgagatctaatttcttcataaatgcccaataatatataatatgctcttttgagcaacgcttttcagattatgttctcatacagccttttacagccctttacagcttttctgtaaactgggctgagatgtaccactaaatgaaattgaatgataggagtccattgtggttggaatagatacacacagtgattgatttaggtagattagaaggtggatggatagatagatagatagatagatagatagatagatagatagatagatatgcgcacacacattcctctccttgagtccccctgggtaagccgaggcatgagtactctgaaggaaaagcaaccatgagtgagctgcagcatccttacttaacctccaaacttaacctttgttgtaatatatatagaaaaatgagttccgaattccctccttaatctccaacatgcaggcactatgcctctgcccagtttctttacccatgccttttattatatcccatccccaactgaaccctatctcgacctggtcaataggtgtgagacccagatattcttatccgggagatgctatttctttttttccagaggccagaggtggtttttagtaaccacctgtatcattttgcaggggcttcttaaatgcgtggccagactcacctcactgtgcctaggtgccaatatggcctctcagctttattccccttgcaatccaaaatctgccagaactggacagcagtttgatccttgaattagaccgtggttcatgatgcttgcttctcaccctcccaccagctgtgctttatttttctttgattctaactattacagaaaagacaagtcagactccttcatcgctgggcaaagttccaagtaaactgcattgggaatccttggcattttaacaatggctcactgctccccttgtgactaatgggcaacacaggcctgtttatgagttcaagtctctgtccctggatcatgtaattttaattgttctgttacttcatttcaatcctggtccccacagcatttttctcactgttcattttcaaatttagtgtccaacctattactgtgtgcttttcttaatccctagaccaagcactctctggcttgctcattttcccacttgggcaccctggatcccagccagaggtggcccttaccacttggctcctccctcagtgcccttggacctctttggctcgtaactgcttctgctgaaggtcatccttttggctccatgatcttcatggctgaggttgcttcattacttctggagggaaatcttgctgctttctgtaaacatttttttctcatggcatatttatgtggaactgtgccatttcttttcctacttattctgaataaattgagcattcctggaccagatattagtggaagactcctattggatgggggtgggatgatgggttggtgagagaagacatgggcaatagtaacctcccaggttttacaaccgaaggaccaatcctttattactaacacgtaaactttatcttaaaatacgctgcatccatgttttttccaacttggggaatttaatctatttcaggaaggattctaccacggtgttaggaccccctgcattccagagggaacctttgttatctgccaccttggaacctccaaaacaaagtctgctcccccaatatgtgggccttcttctgccttccccagcatctgggcctcactgtagctcaggccaactgccaacagctccaacctaggctggcttctactcttagagagagaatattttcgggccctttccgagatcccgcaccactagttccctccacgctttcatctgttgccacagcaacattttggcttcttatgcccagttctgctctccgttgctttaagcacaaatgacatgcaatttgggatgtaaccatactttttgtttcctagtttcactaaaaatgaggttcttgtgtggttttctttttcattctctttgctgtactatatagagaaatgaattctgaactgaattccctccatattcctagcaaaaacataactcctttgaattgcaattttgatttccttttcaacccaaaaattagtgagatgtttttaagtttccaagtggaggctttcttgttagtactgttttggtgaggttttgttttgttttattttagttttgttttgtttttctatgtatgtgttttataccggtgagagaatatagcccgtgtagtttctaatttctatttaattttactttgtggtttaatgcattatgtttgggaaaatatgcattcactatttgttgagtacacaattttataaatatttgataacttaagatcattatttgctttagcaaaatatcttacattcacattattttacaattggatatgacagtttagtttaaaagtatgctaaaagctcttaaatgtgtcaatttatccttcctaacaaagcacatttttttccctaactttcaaagacttgtttaggatatgaaggcttataacttatgggtagttggtgaattgtacattttagcataataaagtatccttctttgacactgaaaaatttcttcatcatttattctactttgttcaatattagtatttgtaatggtttgaatgtgtccccaaaaagcatatgttggaaatgtaatattcaatgcaacagtgttagtaggtgaggcttaatgatgagaggtgtttaggtcatgacgactccatcctcataaatgaattaatgccaattacaaaaaggctaaaagcctgtgaattcaacctgttgcacttgggcgctctctctttctctttctctctctcagctctctttttatcccttttgccttccaccacagtatgaggcagccagaagatttttgcaagatgcaggcctctcaaccttggatttcctagcctctaggactgtaataagtcaatctctgttctttaaaaattatccagtcttggatattctattatagcagcacaaaatggagtaagacagtatttctatccataattaatttttgttagcatttgcctgagtttatcattgtccattggtttaatcactcggtgtcattttgttttaggtgctttttgtttgtttttgtttttattttgagacagggtctcagtctgccgctcaggctggagtgcaggggtgcgactacggctcactgcaacctcaaccttccaggctcaagcgatccttgcacctcagtttcctcagtagctgggactacaggcatgcacaaccacgcctggctaatttttttatttttgtagagatagggtctcgctatgttacccaggctgatctcaaactcctgggctcaagtgatcctccctccttggcctcccaaagtgctgggattacaggtataagccattgccaccagcactttttgaatagcaaatacacacacacacacacagaccatctttactgagcagaaaaatttagatttaatgcaatgatataaatggacattacaaatgcatatatatctggattacttctgccatcatatttttatatttaccatgttttttcattttttagtcttctgtctcaataaatttcatcaaattgcctttgttacttctgtctctatgcaaatgatttcttatacatctttttccttttttcttatgatccagtttttgaaatatttttctacaaataagtaatgcatgtgatgcatatctacaagaattttaaacatccattttttcccaccagtcacatgaaggaatggaacgttacccttaacattaaagtttcctgtatttgtcttcccttagaatctcccttcctctctgcaaaatgcaactattattccaaatttggagttgatcattatcttgcttttcatcatagtaaatattgtctttgtctgacaacaaattaacatcataattaatatcaaaatgtagttttctgttgttttcttcattcaacaatatgattttaagaattatgcaagtttattattttatctgtattccactgatcttgatgttgcagagaattccacattatgattatgccaaaatttgtgtatcagtttacctgcaaatggacactgggttgtttccagctttttgcaattacaaagaatgctctcatgacttttcctgcacattgctcttggtgccttattcaataatttccctaaggtgcatatatatttaagggtagagctgctatgctttaggatattctcagcttcaactctacaaaatgccaatttttttccaagtagattatttcagtttgaagtccaccatcagagtatgagttcccctcaccctacatcctcattgatttttgataatgttagacttttcaatgtttgtctatttagtgattttaaaatgttatttcaaggactgttctaattcacaattctctgataactattgtgagcttaacttttgtacgtttattggtcttttatatatccctttttgtgaactgccctttcacatcttttgatcattttcctatggggctattcttagatgttctggatattgatcctatgtaaattatgtgtgatataaataagtttagattgtggctttttttcctttagagtgtgttttgattaaagtttctaattttaatgtggtcaaatttattcatcttctcttaacatttttgtttttaaaatgtgtatgtgtgtctttttaataaatatttttctaccttgaagtcatacaaatatttctttcacattttcatttaaaagttttacagttttgccttcaatacgtcggtacttagttcatctggaatttattatgatgtatatatatccactaatccagtgtcataaattcaaacttattgaattatacatcctttacccactggtctttaatgaccattcttcacatacaaggggtcctgacactctttccattctattctattggcccagttgtctactccctctctcaccaataatagcacatggtcttaaatccagtggtgtatataatatcttctcatgtagtcaggaaattccccaacttcctctttattttcaatggtattttggctcttcttgaacttgtgttccttcgtttcattttaatatcattgtgtccaattctataaaacattttgttgaaatttttctagaaatagcatgaaactatagatcacattggggaaaactggcattttaatgatattgatgcttcctaaccatgaatgtgtctctccatctgtgcagtacttcttcaacttcttttaatgattttaattttccccactaagatcttgcatgcctttcctttttgagaatttattcctgattacagtggacccttcaacaatgcgagggttagtagcgctgaccacctgtgcagtcaaaaatctgcacataatttttgactcctccaaaactttactaatagcctactgttgatcagaagtcttaccaataacataaagttatttaacatatattttatatttttatgtgttatatactgtactcttacagtaaagtaagctagagaaaagaaaatgttggccaggtgcggtggcccatggctgtaattccagcagtttgggaggctgaggcagaagtgcttgagacaaggagttggagaccagcctcagcaacatagcgagaccccatctctacaaaaaattaaaaatttagccaggtagggtggcgtgcacctgtagtcccagctacttgggaggctgaggtggagaatcgcttgagcccaggaggttgaagctacagtgagccatgataacactgcactctagcctgggcaacagagcaagaccttgtctcagaaaagcaaagaaaatgttatttaaaaaatcataaagaagagaaaatatatttactattcattaagtggaagtggagcatcataaaggtcttcatcctcatgtcttcatggtgaatatgctaagaaggaggaaggggaggagaggttggtctcgctgtctcaagggtggcaaaggcagaagaaaatcatatataagtagacctgcacagttcaagcccatgttgttcaaaggtcaactgtactgtaagtttgttatataaaccagttaatcacatttctacttttttgtttttatagaaaatgcaatagatttgtttatatatttagccaaccactgtgccaaactcttaattcttatgttttagattatttttctctgtagacaattgtatcatctatgaataatgaaagtttgctttatttcattcctatccttccaactttttttttggtctgttgttaaaagcccccctatcccatgcctaagtaataagtaatctcaatattacattccatctcatataataaaatttgacttcctaaaagggcttgcttctttttaattcaatgtcaatgctggaatttcagttcttagccttgaaaccctggtgaaaaaattctcagcaaggtaagaaggaaaaaaatgttctcccctgctcctgaagctggagagaacaataaatgaaaactgttgtcataaatggttatttctaacaatttttcaaacccctagacttcaaatattttggacaggacctgacaaaatgacccttaatctgtaaaacatctgtacttttgaccactcatctttcttaataattcagttctctggtgataatgtttgagcttaaaatctctatcttcagaaggtaacgtgatttgtgaattttctgtcaaatcaggaaagaatcactggcattgccctcttcccacacatgcataggataaaatagctctactggactttttattaatcaaagagcccgagagacagctgaatggctgaaccaagcagagagtggaaacttggggagggtaattccttgctgggccttaaaaggagtccacaagataggaaaaaaacgaaaaagccaaataagatgaacctctattcaggccccaatgagaggctgcttgactctgatctttcgttagctggctcaaaattttgttcttaaagaattatttttactcaaaatcaagaactgttagaaaacaagaaaaattatggagttttgttgttgatttccacctctctacatatatatatgaaatacatatctcctcccgatacacatgcacacacgcaaaaacatatttaactgaaacaacggtttcatgaaactatagttactctcattacctgtgatgcaggcaagtattttcaattgtattttattctatttcattctacttggaaaaaaagtcttttggtctcaacataaatgggttctgacctgcagtttcaagccaatacgttacagtaagagtaaatgtagggtttctcccagttttatctggcagtcccaaagtcaggatcagagtaaccgatggagcatcatttgtacgctccacgtctgaggaggaggtctgggaaaagatccaacgtgtaggactggcgcagaggctcaggcctgtaatcccagcactttaagaggtggaggcgggaggataacttgaggtcaacagttcgagacaagcctggcaaacatggtgaaaccccgtctctactaaaaatacagaaattatccaggcgtggtggtgcgcacctgtagatccagctcctcgggaggctgaggcacgaaaatcgcttgaacgcgggaggcggaggttgcagtgagacaagatcacaccactgcactccagcctgggcgacagagcgagaccctgtctcaaataaaaaaaataataataataatccaatgtgtccctagtctggctttcagggtcttagatgaggttcggaagtggacttaggagccttaggagcgcagccagtgctgtggattcccacatccacgtgacctgcggtttcgcgttattccattcagggatagatgacgtccctcatttctacctaccagtgggctggtcaagattctcatttatcaagtcagttggagtgggcttaagtaagttctcagccaaggctgtggggtctggaggaccagatatcccgaccaaaagccccccctcccattcctttcacacgcctgccgcagaggtgcacgggtgcgagtggggaactgaggcaagaagcagatggggcggcaccgagagaagagaaactacgctagaggaaaagctcgagctgttacccctcccgacttcttccgccttccgccttcccccttccccctctttcccctcttgcccctctccagcttttctggtccaaccctcttctgcgcctaacactggcacctccttttcttccggctgatgaataattgtccgcaaaccagcctctctggggcactgaggggcgggaaggttagaaggagccagggctagagtcctggaaggtggcagtcaggtcgcagggccacagcagtcactctgcgactctctcttccggtgtttctccagcgccaagcgggagaagacggagcctgggagctgggactggaggagcgggaagcgcagtatcgggaccacggctctgggaccaggaaaaacgcagactctccagagtcaatgtctacttcagccagctcaagggcgcgacaacctggcgccgagcatctcaggccgccgcggggaccccccctaagggactcgggaacacctgcctaccctagaagaggcggagaataaccccgtagggagttaagcggcctctgcctacagcgttcctcccgcctccacggcgccgagccctgattgacgttcagccaggccaatcatagcctgtgtctgaggcgcgcggagctggagcgcccagggcatgtccgccgatcccaaggaggcaatctgtcaggcgccgcccgggcggcagtatgcctgagggggtcctccgtgttcgcgcctcccgccgcctgcactgaaaggtctgtacctgagcctggatacttgaacagaggcagacactgcggctcaaaaccccaagggtaggtgcctattgtgcggagtctcggaacgcctgtctggaagaagagttccggcggctccccgaacgcttggagaaagcgcttggatgcagttgcagggtgagatttgagacggtgattgtgttttccagcaggcgctcaggcggggtggtgaaggagggatacagacctctaaagattcctctctcgttggggtgaggtggggaacagcagtgacagtagttctcatccctgagcctcctccgggccggcccgtggaggagagagaaggggagggagaagggtttgcccaggccttcagacactttactttgtgggagatgtatgtgctgagtgtccctgctctggagggattgttaaagaatccaggttcttggggagtgtctcaggagaacactccaggtgatatccttattcttcctattttcaccgtgttgggttttttttggatataacttgttccctttaacccgaggtggccttggtgtctggcagctgttttctctgccaggcaccaccctctgggcctcacgtcttcatccctcaagtccgctgcctctgagctgctacttagatctggtctgtttctacctctgctggaccagaagtttgcattaacgcccccaccccatcctgcaagaccggcgcttccaaccaagggctctctcctctgaacctagaacctgcttggaaatcgagtatttcctctatgcccaggtggagattgatgtttgggtttcacatctcccaactctgttgggtactatgtcgtttctcagcttggttgtatgtgcctccattgagtggaccgtatctccagaatttctcctaaccctcccagtgtactcccctgcaatcctttctttttttctccaaatcccccaccccccaccagaaatgactttacccctgtgccacttattttggcctggagcactaaggagccatactacacccaatgccagaggtggaacagaaatgaggtttgaaatgggaaccagaagctaatctgtgggaaattcttttactcctcagacgtgtaaagatgtgttggagactctcgtaaatatgtattcagtaatgcagcatatacagtgatcaccatgtattcattttttatgggaatcaacaattcagaatgatcaaaaatccctgtgtgtagagacatgaatctataggaatatcacacatagtgagcacaactgtgagtgaaatcccatgtttcatgcatcccagcagtcccaaagggagcctccaaatgtgtacgggattcagactccatgtaacctgcatctgtctatgcactagctatgtgagctgttacctcagtcttgatgaggttactcaggaagtctgggatcttgatttttgccggtcactgatcacctggctacaggaaaggagacctaaatccagaacttaaatttatgaacaccaggtctgtaggcactagacctcagaagtaggtgagtaggtggctattggttggtcccttctggagtgaggcagagatacctatgccatatgcaacataaaaggttgcctgagcccctcagcctgaggtagagtaaggagggagaggtggagagggactttcttctcagaccagggaaatcagaagccatcagatgccttcagtagggaatccagcacaaagaggatcataagtcatctccccacttctctatagtcatcatagacgtaattgctaacctacccttccttggtgctctggttagtagagtgaagttgagataatataaatgaaaaaactgagcagaaagggagtgaggatacggggcctcttcagtttgccttatgggcttcccactctaaatagatgaggtacacaacattctggcagtatcacactagggccagagttggtagctcacagatgtacgatagaggatggaaggagtatgcctctcaggcaggcaagtttagcctggtagacagaggatgtggcttaaaagtcactgcctacaagaccagtgcatgcaagtgagtccctgctgctgcttggatcagaggaggtgaggcagaaggctgatgaaaacccaccaactgatggtcagtccgagaagcagtcaagatggagaactgcaaaattaacagcttaagttttccaggagtctcagtgcccaatgtcaggtctaccagggatgtccagcccctctggtcagagccccaggagccttgtctgaatgtggatcccctctgcttattcaaagagacctgggaagctgagccaggaacctggataatgaccagaaagtcacccagacacctgagaaatgcctcccttatatccaagagatccctgtgtgtagaacacatgaatctattggaatatcacacacagtgagcagactcttcttacacttactaaactctcttcgtagatttactaaatttttcaccagtgactcaatggagcgaaaccaggtcccagactcgatttaaaaaaaaaaaccacacacacacacacacaaaaagttctttaggtgagcatgtatgcatgtgtaaatggtactatacaatggtatgattggatagtcaaaggaatatctaacccaagtgtacataaggagtaaatttggagtcagaggaagttggtcattgtaggaaagtaactgctgcaagaaagatttcttagaatgtaactgtctaatatgaggcatttatgcctcttttcctccatgtttctagtttctgccttgggtttggcatttattgtttatcctgcttcaagtataagactagtggtttattcgagggcccacaacttccacttctaccctggcgtcacacagatcattttctcttctcaagtcattgtattttcactggtagtaaaagaggataatatcttcatcttcaaataaattagtgggagggattcaaattatgagggaaaagaaaaattggttcttctgctgtagggaagggttactgaaaattaaaggacaacctactgagctgaagagagctttggggtttggtaatttggggtgtgaggtggatcttcaggaatgccatgggcttcaagactagtgtgtctctcccttagtatgttcctcctcagtttgagaggacttcctggtaaaggactgaaagaaatgtccactccatcatgtctctgctgacacctagcttctcttctccagttataagtccattttcctactggggtaacacaagaaggaggaagaatagctcaggggtcttcccttcacatctctcctacaaggattgtgaaatgtcatatgcctcctcccatagacttagacagacctaaaattgtcaacatgtgtccagatagttgcaaaaaatatataatttccaacatattctccatattaacactttaaaataaaactgttaatcgctcatatgttcaattcaatctaaatatcataatgttttgacacccattatcattaatttaaaaaatatacaaacaacctctttcttaatggttggaaattttacattgctcttttttcccactttgaattcatatttttattctaccccccatgtagaatttttctttttcttttttttttttttttttgagttctcaaccctggttacatcctaatgtaatttttttctttgttcttggaaatcttttattgagccacctattctgcttctttgcaacaaaatatgttcttacattgaatttttaatttcttgttgtaagtgtaaaagttatatgggctgggtgcagtggcccacacctgtactcccagcactttgtgaggctgaagcaggaggattacttgagcccaggagttcaagaccagcctaggcacatagggaaacctcatctctacaaaaaaaaaaaaaaaaaaaaaattactggacatggtggctcctgcctgtagtctcagctacttgggaggctgaggtaggaggatcacttgagcccaggaggtcgaggctgcagtgagccatgatcgtgccactgcatgcactctaccctggatgacagagtaagatgctgtctcaaaaaaaagttatatggattaagataggattaccaactgttagagatcaaaataatgtcagtacagattggatatgccttatttgaaatgcttgggaccaaaagtgtgttggatttcagattatcttggattttaaaatatttgtatatacataatgagatatcttgaggccgggacccaagtctaagcatgaagttcacttatgtttcttatatacattatgcacatagcctgaaggtaattttataccatatttaaaataattttatatgtgaaacgaagttgtgttaagtacagtacttacatgtggcatcatattggtgctcaaaaagtttcagattttggagcatttcagattttctgatgagggatgctcaatctgtaatacacattttggtaaataaaagtgtaagtttgtaatggtaaaatttaactagaaatgcatctcttaatgagatggatagggactttattttcccaatttcatgttgacaaatgttacttattgttaatgaatctgggatataaatgaatgagaaaataaagacttgttgaggcaacttcacccaatttttaaaatttcttcttagtcgtatgcaaaactcacataatgggctattattaaataatatttttaataatctgtcagctgacaactcaagtataaggttcttcttcaattttgttgaaagcaaagaattagaaaccaattgacttgcaaaactatttttatacatacattaggttctttcactttgtttttagaactataccaaagacttcacaaagtcttataaaataactaataattatacctgctgctctttcccttagagataccttgttcatgaatctcaaattagataaaactagggttaaagaaaaacaaccccccacacacaaaattggagatcaaaaatcaataggttcttaaaaaatatctcttcattttttatgtcatctggaagtgccttttaaaactatgacacagagatggtgctgtatagtttacagttcatgtgtgtgtgtgtttaatttcattattgtacaaaattgttaattttataatcatgcatttgatagatgtaaaacagtgtgtcagcctccaagcgggagaaattaatccaaaataaatgaagctggatttctaaagtttagagcatcacatccaagattgcatttgggaacattctgttttgtatccatacacaaatgaatttctgtttttaagaacacaatttaatctacttagtggaaatcaacagcaaaatgaaggagaaggtattagataattaataaatataggtttacagaaatctattactgactgctattatgtgcattaattacagcagaatccacaaaacattccatcaattaaatcttactctaggaggtatatgataaaaataaataaatgaacagagaaataacagcatactataaactgttacccaaatagaaaaatatatttacactatccagaaatctttggtaaaagttaatgaaaatatttcccctattagttagaagaagttcaagaaaacatacattaaaataccttcaatatgtgtttgttttactccaagatgtgatgttgatctgtgagaaattaattttgagcgttttgcctccactgccttgaaataatgcaaaataagcaactgagctgggggcagtggctcatccctataatcccagtgctttgggaggccaaggagggaggatcgctggagcctgggtgacagaataagactctctctctctctctgtgtatatatatatatatttgcaactgaagcacagatgggacacaggtaagtgggagaactcaccaagctctttgttagtatttagagtgtttcatagaaagttaatatttcttaacttttttttttttttttttttttttacaaatttagaatatcctagctctgagacaaaaattgggaacctcagcatgagtttgtcacctgaatgaaataaaaaaaatcacgttgaaggctggtgcagtaacatgtgcctgtagtcccagctactctggaggctgagtcaggaggatcacttgagaccagaagttcaggaattcaagactggcttgagcaacatagcaagacttcatttcaaaacaaacagaaaaaagccaccaccttcagtatttcttgccaaagcaaaggagccatttgttctttacgatggtcaggaaaggaagcatcaaggtcatcaaatgaaaaattttcagcatttcagcctctctgctcagggaaatacctgaatctagaatatcacaacatgagccaaaaccgccccatttctcatgccacatgtcactcttaacacaaggttactcaacctcgagcatggttggcatttggggctgaataattcttttttgtagggggctgtcctgggcattgtaggatgctcatgagctacctcagtctctaccacccactagatgccagtagcattgacccctgatctctctacccaagttgtgacaactaaaaccatctctggataatggaggaaccttaaatgcatattgctaaggaaaagccaatctgaaaggattacatattgtatgagtccaactatatggtaatctggaaaaggcaaaaccatggagacagtgaaaaggtagtggttaccagtggtccatgggaagggttggatgaataggtggagcacagaggatttttaaggcagtgaaactattctgaatgatactgtaatggtggatacatgtcatacctttgtcaaaaccaataaaatataacaaccaataaaactgcacaaagagtgaaccctaatgtaaactatggacttaataatgtatcaatattggctcaccaattttaacaaatgtaccacactaatgcaagatgttactaatagtggaaactggagggaagagggcttgaggggacatacgggaactctctgtaattcctgttcagtttttctgtaactgttaaactgtccaaaaaaagtctgtttttataaatggaggcatggttttatatggactaaaatactatgattgcctttttattttacacatggtgaaattagagcaggacatattttaaactcaaaattcacaaaattaatttatgaaaatgtttacccagatcaagaatattaaagaaacttagattaatattgttaccttgaatttattttactgagtaatcctctaagactcctctacacattattaatctagaaggatttttaaagtctttatgacaattaattattggtctacagtcaaattgcatatccccattaactagagttatatttttccattttctgatccaaaaactttaggaacaggaaatgtttattttagaaaacaagaacacttcttaagcatttgctgttaacagttattttcacatgtgcttgtacttattttacacttgtcagaacatagtatttacctttgaaccaaggttttataataagcaagcactttttttatttagaagtcacattttccaagtagaaaaatcattaaaaattcagtcctctgaaggctaatttctttaaatcatttaacctaattgtttaaggtatagattggaatttttctcagcactctcttgaaaacaggtgacagtggaaccctgttaggttcacaaatcctagactttgattatatagcccaggctcaaatttttctcgaatgttacgaacattcaaagcattaggagtcttggtttcatttcttaattttttttcttctgggtatatttgagactcatcttggattcaaataaattaataatagtctcatgaaaccgataaaaatgggagctccattgaacatgagagacattgattcgtagtttctaacatcctccaaatgaggagcccatccctaatttagatgcttctttcaaaggaggctcctttccttcgttatccataatatagtcacaccagtcctgaaaaaacatggaacagactccagatctttatatttcatactctaaagtcgtacaagccaatctgcatttcctctagtggaaactgtatagctggtcatctttccaggacccttttatcaagaaacaatgcagtttctacatttgtgctgcttctacaccaaaacagctggaatgtatatagtatggttctggatgctcttgtatacctcactcttcatttctcacctaacccatgtgctatgatttgaatgtttctcccctgcaaaactcatgttgaaatgtaattgccatgataacagtattaataggtggaatatttaagaggtgattagggtgggattggtgatgttataaaagggtaagttcagccccttcttgctctctctgtcacccttccaccttcctctgtgtgatgatgcaacaaaaaagcccttcccagatgccagcatcttgattttggacttctcagcctacagaactataagccaataaatttctgttatttgttattagtctgtgatattctgttacagtagcacaaaatggactatgacaccatgtgtttacacagaaagaaaaaaatatcatacggtaattgctcctaaatatgcagagaatatgttctgatatccttagtggatgcctgaaactgcagatagtaccaaaccttatatatactatgttttttttcccatacatatgcatgttaaagtttataagttaggcagagtaagatatgaacaataactaataatgaaatagaaacgtaacgatgtgctgtaataaaagttatgtgactgacacctctttttcttcctctttctctcaaaatatcttaatattttcaagccatggataactgaaactgcagaaagtgaaactgtagataaactattaactctatttaaacaataaaagaattataattatattcttgggaaaattaacaattatccaaagtccctttgcaaagggaaaaaaaatgcatgtattggaaaaaatctcaaccacagggttccctaagctttgcaaacaacaaatagcatccacctatccatcctcagagagcaacagttttactgttatttagaaaaagcaactatttcaggctgcaggttgtgcacatcagcacttcccagctctctactaatatgggaaaactgactatccctgacttcagtttttgtgaagctaaatgcctgactagagtttaaactgaggctaattggagatcataaaattttacagcttgctagaggtggaccacgattttgattggaaactttccaccaaccaattctaaaaggtgttaatggtgactattttctaaaacaaatctgaagagtaactaatatgataagaccagaaatatatttctctggcaagtccctataaaaagaaagctaggtaattaaataatctctcaacaatattgttttaggaaacccaatagagagtttcacaggcctgtttcttatgggattgctcaatgtaggtaaatattatcaaaccaaaaagtaattttgtaacagaaattctacagagccccaataccttacagaatgatgagtacaacagtagaaacaaatagaagataacctagaaaaataaagcgaataacttaatggcgtgagttaggttaagaaaagcttcctggaaaaagacatctgaatagaattttagtagatatagctaggaattcccaagcaggtagaagaagggggacattccaggcaaaggaatcatgtgaatgcaaaggtagggagtcatgaatcaatatgttcggtttttttgttgtttttgttttataaagagctataataggctgggcacagtggctgtaatcccagcactttgggaggctgaagcaggtggatcacttgagcccaggagttcgagaccagcctgggcaacatggcaaaacactgtctctacaaaaacaaaaaaaattatccctgttcagtggtgtgcgcctgtggtcccggctacctgggaggctgaggcgagaggagtgctcaaggtgggaggtggagattacagtgagcagagatcacaccactgcactccagcctgagcgacagagagactctgtctaaaaaaaaaaaaaaaagctataataagatcagcttactagacaatacagtgaaatgggggaagctagagaagagaggtgggcagtggcctcttatgctacgtaagagatttgacatcataaagtaagttgccagagttctgaatgagggcattagaaatagtaatgaacaggaaagcatacacttaagagctgtctgctgtctgggaggtggaatttacactgagtactgagtaatagaatgaaggggttgagggaaaggtaagaatctagggtgagtgtaaatcttctggttcaggggataaacaacaggaagtcattgaaatctattggcctatccgcattttgaaattatttttactcatgtaagattctgtaacattatatggtcattaggaaatatctgtttactgaattatggaggtattcgaaatgttcaaacatttcatgcaatatcaaaaactcaaactggctgcagtggcttatgcctgtaatcccagcacattgggagaccaaggcaggagtactgtctgagcccaggagttcaagaccagcctgggcaacatggcaagaccccatctctacaaaatttttttaaatttgccaagagtggagtgcacatctgtggtctcagctacttggaaagctgaggcaggaggatcacttgagcccataaggttgagagctgcattcagtgagccctgttcatgccactgcaatccagccttaacaacagagcaagaccctgtctcaaaaaaatattatattcattaatgttgctgctgatatcagaaaaaattctaagtatcccacagtagcagatacaagcttttcaaaattccaacttctacttttaaaagcttaaattttagcactggcaacaaatacaactagttgttttccctaaagtgatagtatcactgtttattttcaagaaaatgtctgccaaattcccaagtctgaataatcaattttctgtcactttttttttccaagtgaaaagatggtgtttccatgaaagaaaagaaaaagtggctaattcagcttgcaactcaaacaagtgtttttccaaaagacaactatatttcagcatgcagtagaagtgttttatgggtacatcacattgtgtcacaaagaatttttttaaatgtgcttaagggttgagatttagtagaaaataatttttacaacttcatcaaggacattattttagtaaaactgtttttttttttactacgaatgtgtggtggtgaagaatacaatgactactaataaaatttggtgccattgccttaattcgtgctaagacaccagtcattttacccaccattggataaaatccaccatttttgcaccatcagtgcaaatgttaacacagttaacacagttgttgaggataaaccaccagattcaaaaaagtcatataacacttttaatgtttcagaacccctgttgcccagaattcacataaaagaagatcatcaatggtcaattgatgctgatacctgatgaatgaaagcaaaacaggatgtatagccatctgtagatcagtccctttgtaaggctaaggtacaattctttagatgatatattaactcagtctttatgtttgcagttaaatctttaatttgacaagttattgcatcattggaaaatgccagcactatgcattcttgtggtgatttttcatccagcaggtattcagcaatgtcaactgttcaagcctttattagtctctctgtgattgtgtgtgctcctctagccaatacaatatgatggcttatcctgtaagaagcttttaaagagtgtattacatctacatttcggttatttaattcctttttttaataaattctgaatgattggtcccaaaatgatactgcaactttgttggaaccatataagtgtttgaaaatgttttactgcacaagacacaatatgataaattattaacatctataaagctgaacaaaagatcactttcaacatatttttgttgtgtatagttgtgctcagtttctttggaatagatttctcctttttatgaggaatcagataacttgctgatatgtcaatgtcatccttttcagcatctctagacataggcaatctagacaccagaaaatgtgttttctcttctccctttttaaagccaaccatccaccctattcagataaaattttttaattaaaaacatttttgaaaaatatattattgcaaaacaacaaagtaaacataatttttgttatgtttctgtgtaaaaggaaaaactttaggatttaaaaatgatttcttggaagataatgagattacagagattataacaggtataactgaagatagctggtaagagcatggtagaaaagaaataatttctgaaaactacatacttataccgtaaactcactacctttgaaaactctagaaaatacaatacacaggcacacaatctgttaggtatcagagaaatagtcatcactattcatcacatgccattgttgtctttggcgaacccttctgtacacttatgagagtgagagtaaaaaaaaggcaaataacatcttaattttatgaatatttttgaccttgttgaccctctaaaaggatccaagggatctctcccttccaacatccccaggaatcctctgatcacattttgagaactgttggataagtcagttaatattgcaggaacataggctatcaccatggggaataaatgaaaccagatctctacctcacaccattacaaaaataaattttaaatgaaataaaaggctaaatgtgaaaaggtaaaggtttaaagctttgggggggaaatgtagaataactttattatctcaaggtagatagcctaacaataccacgtgctgaagcagaaatgtgaagaaatgggaatttgcatagaatcttggtggaagggttagttttcccacttatttcaactacttatttcacatatgcagtgttgtacaaatttaaagagacaagaatcctacagacaagcaattctatgtttatatgccctagagacctgaagacattctcaaatacaaaaacaaagaagtatgcataaggatgttcattgcaggtttgcttataattggtggaaagtcaggggatgcccatcagtgcataaaaaagtaaataaaattgtgttgcctttctacaataaattgtgcaaccattaaaataaactaaatgtccatatttcacaaggacaattctcacaacataataacaaatgatatgcactaactttaaactagtaattgcatctggtgagggaaaagaaaggtggacctgaagtcaggtgcaaacagcacaactgtatttgagtagtggttgcatgactgttgttccatgtattttctgtatgttacaaatatttactattaattataacaacataagatgtactctaactccttcatgctgctaattatagaatatctactttgttgactaaaccctttagcatatatatatatatatatatatatatatatatatagcctatttctgttaatggttctttggataaataacagttgactttgttcctctgcttggtattttaaaaaacctattagtttacaaatctcttactaattttagttttaatatttgtattgttaagtattttaaacacacagaaaggcaaataaacccccattacccaaacacccagctttattaaatcttagtattttgtcctatttgtttcaatggtttttttaataaatcagtgactacaataaaattgatacctctgaatccttccattttcttttcactgcccccagatataaccaccaatgtgaagtcagttttatcattgctatgcatgtttttaatatttttactaaatgtttatgaattcttaaacattatgaagcattatgttatagagtttttaagttttataaaatattatctaatactgttactttaagaaaacctgcagtaaccccttctgaaaaagattaatcacacgtaatttgttacatattaaaataactgctcctaaatagtgatgtggccttgggcaagctctttcaagtttctgtgagctccagcttttccttatctgtgtggtaaaagaatatgagactatgtctgcgctctctttcagattataagtctctataaattattcaactcaaatgtccccatgggtttacttaaaggatagttttgtccacttatgaacaactgtgtttcatcaaaatcagaatttactgaatgttcattcattttaacttttttaagtggtttgtcacagaattcctttcaatgctgagattttcaaatatattgcaaccatcgagaggacattcttgaatattcactatgagcctgatgctatgcgaggtgccagagatacaagagggaacttgacaggtacagtctgtctcccacaaagcttatggctgagtttttaaaatataattcaagcttttcaggaatacagtcaatccataaagcaatagggagaaacattccaatatcaagaggcactgatgaatgaatgtgtgaataactaaattttgtaactttttttgtagacataaaaataagcattcactgtgtcatccttaaataaaatcattggcagagtgtagcctataaatgtctggaaatacctcaccaaaggctagaagacattttgccagaaggaagtaatgtttacatttctatattttgtttctttttcctctacatatgcattttgtcctatgtctatgtctccttcttaataggctttgacatgaacccaaagcaaatgtttcctattattttatctatttattgaatatacattgttttctgaatgctattcctttcatttaccagttctagtagtctgggtttgctcttatttctctttactctaaaatggtttttttaatctgtaacacagaacttagtgcttggttatatataggtaggcattgttttctaaaaacactggtttacaaaatggaatgtgcacactacagggaatgtgcaaatgatccttgaggatacaggaaggaagtgttaaagtttctatttattttggtaacttataaactttctatttgttacagtgtgagttctggtgtatatagtcaagccatatgctagtacatgggataatgtataaataaacatgtaagtgtcgataagtactcaactcttttttactgagagggctttaggctttttttttttttaagtttcaataccacagttcaaatgtgtgtgttggtcttatctatgtaattgttttgtgtgctctttcagggagtggtggtgtcttgtgtctcttactctgtccaaaggaccttgtatgtataaatgcgaataaatatttattgaactccactaataaatgattccattcttcagaccatcaaactaaggactacgctttgaacatgctttggaaacattttcattaaagccaaaatgtctcagaaatgtttaattaaaaaataaaattggccgggcgcagtggctcacgcctgtaatcccagcactttgggagaccgaggctggcagatcacaaggtcaggagtttgggaccagcctggccaatatggtgaaaccccgtctctactaaaaatacaaaaattagccaggcatagtggcaggcgcctgtagtcccagctactcgagaggctgaggcaggagaatcgcttgaacccaggaggtggaggttgcagtgagccgagatcacaccactgcactccagcctgggaaacagagtgaggctctgtctcaaacaaaataaataaataaaattaaaagggaagacaaagatatttttctttgtaccagtagaaggaagatttaatgaaaaataaactgcaatagtaaatttagaagtaatactgaaagagcaactgggaagtcttagatgaagttgtcaccagcttcttcaaagcaatgaaatatccagttgtcccatttaattctcatttggtataatttttcattgataagaataattcataattaaccagcttacatatgcttcttaaattttagtgtacataagaattgctaagaagtaggcttaaatgcaaattctcaggctccagcccagggatcctaattcagcagttctagaggttattcagaaatctgcattttcatgaagtaccctggatgattctaatggatgttgtctgtaacacaactttcagataaatgtcctgtataagcatattctatcttgccattagccatgagaatttgattaagaaacaaatctaagaacccaactactagtctattactccaaccattccttcttgccaactgtgatcagaagtatgaaaaaaacagcccatgttcttccttagaggaagaccatatcccaactgtgaaatggtccagacatcttggaactgaatatggattgtgatcctgatacccccaaccctcactgctcttcatataccagctgagcatttcataatatttattcgataaacctttccttggtcctgagcctccttgcttcccgacctactccatgtagcctggctactcttatttccatgaggtgggctgtcttctggccctcccatcatccccaacagatgtgaacatgagggaccttggagcaggggtagatactccagtgcaaaaatagtggacactcacctcttctaagaccttttatcaatcattctctaaacacctctcaaacatgtccttcccttgtatttcctctttcagtggattaaaccactgtccactcaactgtctgagtgagaagattggattcagtgagttttcaggtcctaccaagtctatttcaaagtgtcatttcaatgattttatttcctttgcttctaaatagtggcatacatggatatcaagtactgtagtgggttcaaaattggagaaatggattttgaagtcatctttttgcaggtacaagagaagccatattgagtcagtcagagaagagaagacaggaaaagtagaataaaatctttagaatattcaaagcattacacaaatgtaatgttttattattaactgtgacttcattttggttccaattctgtccagagaaatttgaatgctggagttttgggaattttaaggctttgagcaaggaacattttatgatcctctgcttaccacttgtttatttacaacagaatttcagcaatgaagagaaagttatttttgtaggaaaaaaaatcctacaatgcttacttcatacaaattagttgtgccttgggttcagattaacatacacactcaaaagacttggtgggctgttatacggcaacttatttatttagctttgtagaggaatattggatatggaaacatagcttgtcagcctgacagcattagacatcttcatcaggagtctttatgtattctagatgctgattcttaaccctctcatctcatgggaatatgcatggtcatagtagacaagaccacaggagtaggggagaggcacgggggagccattctaggatggaagaatctctcacatgacaggaaccacatcttataccaacccatgagtgaggattccaagaaaacaggcatattcggattcaagaaacacaccataacagagtccagggcctacatttcccaacaggttttcatacgggtctggtcatataggtccaccaagtctaaatgcctgcccgcagtctgcccagcatagatgtagttcaccaaccaggggtcatttccacacttataaataaataaataaataaataaatgtgattttttaaaatacagctgacatttcacatttatccaaacagtacatttcaaagaaacagtaagtataaggtaaactggagttcatcttcccatgggaaaaaagagcttaaaactgttgttaaccctttgacctaccaacaaacattgcttactcccactcaagagctcattccagttaggacacaacctggtgacagcccttcctggtagcaactactgagcattgcaaggagaagaaattgggatgggtgcctataaagagaaaaactctctttttaaccttcaaatctaaagaaaatcaatccaacaagcatttgctgcaaacctagtgccaagcactgccacataggaagatgcatctgccatctgtcaagacagactgagggaggaatgggggtagagaccaattagaaaataggaaaaaacgagaccagctggggacagctgcagcaaagcaccctgaggatactaaacaccctcagtatttagctaggatggcctaaaagagctaatctgaaagaattcataaatcatatggatgcttctattataaattagaggaaaggcagatttatacatcatgaagcctataaggtaaatattatctagtagtatgaacatagcttcaccacacagcctcctaaaaatctatggatactttcctgaaagtacccctgaaggcattcctcctggattctgtgaagtaaattagccctcaaggtgtacccagcaagggctcaatagagtgcacaataaatgctcaacacacatctatcttcctcccctcccactatccaagcttcatgcctacctcatgaatctccaagttcctttctctcctgtccctggagcatagatgaatcagaatccctgcttgccaccccattggacaccttgaaaagagacccttggaatggctatgacaacacatcagtcctggctacgagtgtaagaccctgggcatcaggaagcctcaggccatgagctattgaatgtcgcttgtcactttgccctttgaggaccagaaataaagcttccagttcctgtgaaatggcaaataggtaggttcaggcttccagctccctcacccaaaattaatttttgtaaaggtagagaagcaaaaggaagcaaggatctggggagctggcaacaccagaaataagtataaagtgtttttatatttgccaggagagacagaactgctgtcttgagctggtgtgcgtagagaatgggcagggctgcatcctgggagataagccacagtgggagaacaggctgcaggaagactttttaatttctgcactatgtccttcccaatcggcttgggacaattgttgcctccccttcatacataaacaggctgcaacaggccaggctacttgtatcttcaaggtaaatcagtagggaacagatgaaactaggggtgagcttttgggtattctcttctccactactcacgaccactgccccaactcccagcgctggtgaatcccaacgtggagcacctgcctactcccaactgtgcttttcctaggagttgcctgaaagagtagtggcaaatggggagatccacagtgtttctgggctctctaccagggctggatctggagggacacagaccagtatttgactttatctcttccccattacacattaccccacagactagctggtgccctcctggagacgtgagctcacagatcaacataatgatatggctaaggaacaaaaaaattgcaaaacatagacaacaaattaacaccatatactatctaatgcagaattgtgaagaagatgaaccaagaacttgaaacaaaatggcaaatatacttaagataatagaagataccagcaacataaagcaaaaccagtaactcacaaaaacaaagacagaatattagatgttaaaactataacagtagaagttgtaaatactatagattagacaagtaccaggataaatatagctgaagaataatttgtgaggtaaaagataagatgaaagataatcccagaagacagtaggaaagaataaagacatcaaaaatataaaagaaagttcagcaaaatgtatgctagaaatagaagtatcaacatctgaatcataagagaactcacagtgagaggaaaaaaatatatacgtgagaaaataatgactaataaatttacaatttttttttaattatgaaagacctcagagaaaagggttcaaaggatacttaacaggagcttcagaaaaatccacacctatgctcgttatattgagacaaataaatatttttaaaacttagaaagaagagtttatcaactgggcacagtggctcacgcctataatcccagcactttgggactttgggaggtagaggcgggtggatcacttgcggacaggagttcgagaccagcctggccaatatggtgaaaccctgtgtctactaaaaatacaaaaattagccccgcctggtggcgtgtgcctgtagtcccagctactcgggaggctgaggcaaacccgggaggtggaggttccagtgggtgacagagtgataccctatcagaaaaaaaaaaaaaaaaaagaacagtttacaaaggagtaagatcagattgatgtcagacttttcaacagcaatgaatgcaagaataaaataaaataatatttttatagtagtgaaggaaaataaactggagtttagaactttatatgtatcaaaattgctattcaagtgagatggcataacaaatttattatcatgcaaagaatccaaaggctcatatttaaaacactcttggacgtggaaaaaaaaaaaaaaaaaaacactcttagaggaagtacacaaaaagagaatcaaatcaagaaatttacaacaacaaatataagggtgatttgtcaacaaatccaggaccatatttttaaaagagggtaaatgaatgtgtgtgtgtgtaatatctacttggtaggagaattggcattagagggagggaagtagaaaatcaaaagaacataagagtatgctaaagaacttaggaggcaagatataaatattaaggtagttaagacattttaaaaggtaaatgctcactgtgttaaattaaaggcaaccaccataagaacagaatcagtatgtataacttttaatacagcagaaaaaaatcagtctatcaaatggaaagcaagaaaagggaagaaacattgtacaataaaaacagaatgtgaaatgagttgcaaaagtaaatctttacttcagcagttaccaataaaagaacaaaggctctaataatggaggaaaaagggaaccaaatcatgtgtgatttataacaaatactcttttttaacttttaagttcaggggtaaatgtgcaggtttgtttcataggtaaacttgtgtcagggaggtttgttgtacagattatttcattacccaggtattaagcctagtatacattagttatttttcctgaacctctccctcctcccacctccaccctccaataggcccatgtgtgcagttcccctctgtgtgtccatgtgttttcacaatttacctcccacttataagtcaaaacatctggcatttgattttctcttcctacattattttgccaaggataatggcctccagctccatccatgtccctgcagaggacatgatctcattcttatttatatctgcatagtattccatggtgtatgtgtatcacgttttctttatccagtctatcattagtgggcatttaggttgattccaagtctttgatattgtgaatagtgctacagtgaacatatgtgttcatgtgtctttataatagaatgatttatattcctttgtgtatgttcccagtaatgggattgctgggtcaaatggtatttctgtctttgggtctttgaggaattgccacactgtcttccacaatggttgaactaatttacactcccaccaacggtgtaaaaacgttcatttttctccataacctagccagcatctgttattttttgactttgtaatagtagccattctgactgatgtgagatggtatctcattgtggttttgactttcatttctctaatgatcagtgatgttgagctttttttcatatacgtgttggctgcatgtatgtcttcttctgaaaagtgttcatgtcctttgcccactttttaatggtttttttttcttgtaaatttatttaaggtccttatagatgctggatattatacctttgttggatgcatagtttgcaaaattttctcccattctgtaggttgtctgtccactctgttgatagtttcctttttagtgcagaagctctttagtttaactagatcctgttggtcagttttgcttttgttgcaattgtttttggcatctttgtcatgaaatctttgccagtatatcctgaatggtattgcctaggttgtcttccaggatttttataattttgagttttatatttaagtctttaatccatcttgagttaaggtggatggtgtaaggaagggatgcagtttcaatcttctgcatatggctacccagttttcccagcaccatttattgaatagaaaatactttccccattgcttgtttttgtcagatttgttgaagatcagacagtcataggtgtagttttatttctgtgttctttattctgttccattggtctatgtgtctgttcttgtaccagtgccatgttgttttggttactatagccctgtatagtttgaagttgggtagtgtgatactgctaacgttgttctttttgcttcagattgccttggctattctggcccttttttgtttcacatgcatttttaaatagtttttctagctctggccgggcacggtgcctcaggcctgtaatcccaccactttgggaggccgaggcagggggaatcacttgaggccaggagtttgagaccagcctggccaacatggcgaaaccatgtctctactaaaaatacaaaattagctgggcatggtggcgcatgcctgtaatatcccagctactcgggagactgaggcaggagaatcgcttgaacctgggagacagaggttgtggtaagccgagatcgcaccattgcacactagcctgggcaacaagagcaaaaactccgtctcaaaaaaataataataataataatagtttttctagctctgtgaagtatctcaatggtagtttaataagaagagtattgaatctataaattgttttgggcagtatggccattttaatgatattgattcctcttatccatgagcatgagatgtttttccatttgtttgtgtcatctctgatttctttgaacggtggtttgtagttctccttgtagatatctttcacctccccagttagctatattcctaggtattttattttttttgtgacaattgtgaacgggagttcattcctgatttggctctcagcttgactgttgtttggtgtataggaatactagtaatttttgcacattcattttgtattctgatattttgctgaagttgtttatcagcttaagaagcttttgggctgagacaatggggttttctagatataggatcatgtcatctacaaacagggatagtttatctttctctcttcctatttggacgtctttatttgtttcttttgcccaattgccccagccaggacttccaacgctatgttgagtaggagtggtgagagagggcatccttgtcttgtgctggtttttaaggggaatgcttccaccttttgctcattcagcaagatgttggctgtgggtttgtcatatatggctcttattatttttgaggtatattccttcaatacctagtttattgaaagtttttaatatgaatgcatatggcaaatcctcttaaagcagaaagatatgtaaagattgaaatttaaaaacagggaaaaaagatttacctggtggcaaatatgacacaaaagaaagttgggcaacagtctcaatatgtaacaaaatagaattgatttttttttgggagggggacagagtcttcctctgtctcccaggctggagtgcaatggcacaatctcggctcactgcaacctctgcctcctgggttcaagtgattcgcctgtctcagcctcccgagtagctgggattacaggtgtgccaccatgcccagctaattttttgtatttttagtagaaacagggtttcaccatgctagccaggctggtcttgaacttctgacctcaggtgatatacccgcctcagcctcccaaagtgctaggattacaggcatgagctaccgtgcccggcctatgcactttatttatttatttatttatttatttatttatttatttttgagacagagtttcactcttgttgcccaggctggagtgcaatggtgcgatcccggtacactgcagcctctgcctcctggattcaaccgattctccctactcagcctcccgagtagctgggattacaggcatgtgccaccatgctcggctacttttgtatttttagtagagttggggtttcatcatgttggttaggctggtcttgaactcctgacctcaggtgatccacctgcctcagcctcccaaagtgctaagattacaagcgtgagccacgacgtccagcctgcactttatttttaaccttaaattctattttgggccaggtgcagtggttcatgcctgtaatcccagcatttcgggaggctgaggaggacggattacctgaggtcaggagttcgagatcagcctggctaacatggtgaaacgccatctctactaaaaatacaaaaagattagccggtcatggtggcacgcacctgtaatcccagctactcgggaggctgaggcagaagaatcgcttgaacctgggagatggaggttgcagtgagccaagactgtgccactgcactccagcctgggcaataagaacgaaactccatctcaaaaaaaaataaaaataaaaaaaataaagtgcataaaggacaaaagaaaagatgttcatataacttttaaagaaacaagaagatatagtaatcataaatatatataaactcaacaatacagcctcacaatttataaagcaacaagtgaaagaactacagttagaagttgagttttttaaaaatacatttgatgatttttacaaaccctctctcaaaaactggtagataaactagaccaaaaagaaaaaaaaaaaaaaagcagagttcttgaagggcaaaataataaaattatataagttcaagctaattaataaaacctgaataaataagaaactgatagactctctcacattaaaaatgaccaaagagacatgaaaacttactgaaatgcttgattctggattgcaggacaagagactgggagtggctggagttataaggttctttattgggaaaactggtaaaatttgaatatgtactgtggattagctaatattatatccaagttaaattttcttaatatgactgtttttctgtgtttatgtaagagaacagccttgttcttaggaaatacattgaaatatttagcaggaaaggggcatgtgtgtatgtaactccagacttcctaaccattttagagtaaaccattttttctctctaatgttttttcataaccatttagagtaagtccctaaatggacttaggaatattaatgttttttaggaaaaaaacagagagggaagcagagacagagagaaaaagaaagcaaatatgacaaaatgttgcaaatcattgaatttggacaagtgtacgtaagaattctttgtactactcttctaaaattacttcaaaataaaaagtttttaaatgtcacaagtaacctgtgagttaaaagaaaaatataaagaatatgtagaattaaataaaaattaaaacactgcatatcaaaatgtgttagatatgattaaagcagaacttagaaggaaattttttacctttaaatacacttactaggaaacacaaaaaaagaccaaaatcaataagctgagtgttcaactcaaacgctaggtaaagaggaacagaatacacccaaaggaggaaggaaatagtaaagatagtcataaaagaaaaagagagataaaaacaataaaatagatgaacaaaaacaaaagctgccctttgaaaagacatttctatttattattccaggaaacagaatgaagaacaaaatctgcctaggttattgtttagagaaatttttattacaaaaacaaacaaggaaatacaagaaaggcaagttttacgtccatgctttataaaagtaaatacaacaacccaagtaaaatattaactaaataacaccaacagtaaatgtgtaactataggatgaacaaatagcgtttatcccaggaatgcaaagatgtttcacattttaaaaatctctcaatataattcactatattaggagattaagaaggaaaatacaatgaaatgagtcaattctgataaactattttttaaatgtaaaaaaccatttatgtttaaaaaataaacttttagaaaaccaggaataaaaggaaacctactaatttagtaaaggttgacagcaaagacttctggaaaaattgagtagacatactttttcctattcatctcactaagtacaactaaaaactctggacattatatatatataaaacaaacataagaagactctaaaaggtggaaatgagaaggcagaacagctagaatctcaggatctgaggaatgacatactagtgagttccctgggctttctttttgccacatatatgctgggcttggagctgaagaaagtgacaatttggaaagaccaactggcacaaacaaacaaacaaacagaaaaagccccaacaacacttacaacaaaagccctgatatcactagccaaaagaccaagacagaggcaggcaagcctgtcaagccttagaaagtaactgttcagttctaggcaaataccatagcaataactgtgactctactgccattcacaccagaaagaccaagtgggagacctaaactttcaccctcttgaagctgtaacaaggtgctccaacatcactctgcagtggtatccaagaagaccaattaggaagctaagaatttcatttctgcaagccagtaatggggccccctctctaagatgtcaatggagatgggggcggggggagaacacctgcccagaaataatgaaaatggctaaaagaagttatctaaacagaatggaaatgataaaataggaaccttggaacatcaaggaagaagatagaacaaggtaagcaaatagatgggtaaatacaataaatttttcttctcctcttaagttttctaaagtatgtttgatggttgaagccaaaattataacactgatgtggttctaaatgtatgtagaggaaacatttaagacaatcgtattttcagtgaggaggataaagggatgggacataaattaggaaggtaagatttttattatttactcaaaatggtaaatgatgactccagcagactgtgacaagttacatgtatatgtaatacttaaagcaaccacttaaaagttatgcatcaatacactcaaaaacactgtagataaataaaactggcgttctaaaaaatgcccaagtaagccacagaaagtcagaaaagagtaaacagagatgaaaactggagagaacaaacaaaataaatgaaaaacaattaagcccttcatgttactacaggttggattgtgtcccacagaatcccatgttgaagccctaaccaccaatgggactatatttggagatagggccttttacagaagtaattcaggttaaatgaattcataagggtagggccatgattcaataggattaattcaataggaagagaaaccagggtatgctctcttgctctttctccctcccagccttcctctctctttctctctcactctgcccccagaagatggcaactctctctataagccaggaagagcccttaccagaagctgaccatgctggcgccttgatctcagacttccaacctccagaactgtgagagaatatatttctgttgtttaagccacctagttttattttgttatggcaccccaagctaatacatatatcaataattacattattcctaatacaaagaaatgataaattcttgaggtggtagatgccccaattactctgatttggtcattgcacattgtatgcctgtaactaacatcacatgtacctcactaatatatacaacggttgtgtacccataataattaaacataaaaattaagaaaaaaaattacactaaatgcaaatgatctaaatacctcaattaagaaacccagttcaggccaggcatggtggcttacacctgtaaacccagcactctacaaaaaaaaacaaacaaacaaaaaacaaaaacaaaaacaaaaaaaaacccagttcaaatataacaatataggccaggctcagtggctctcagcactttgggaggctaagccaggtggataatttgaggtaggtcaggagttcgagaccagcctggcctacatggtgaaaccccgtctctactaaaatacaaaaattagccaggcatggtggtgtgcacctgtggtcccagctactcaggaggctgaggcaggagaatcgcttgaccctggaagacagaggttgccgtgagcagagattgtgccgctgcactccagcctaggtgacaagatgagactttgtctcaaaaaaaacacaaaacaaacaaaaacaacaataaaaccacacaaatataacaacataggcaggttaaaagtaaaaggatggaaaaagacacaacatgttttccttaattagaggaatacaggagtgagtgtactactctcagataaggtaaacttcagagccaaaacaaaaaaaattaccagagaaagataaggacgttttataataatagaagggtcagtctatcaagaagacattgcagtcagaaatgtttatgcccaaaacaccagagctgtaaaatatgtgaagcaaaaactgacggaactgaaagaaaaaatagaaaatccacaattataattggagacatcaacacaactctcacaactattaataaaactagaaagaaggcagggagtggtggctcaggcctgtaatcccagcactttgggaggccgagggggtggatcacgaggtcaggagatcgagaccatcctggctaacacggtgaaaccccgactctactaaaaatacaaaaaattagctgggcgtggtggcgggcgcctgtagtcccagatactcgggaggctgaggcaggagaatggcgtgaacctggggacggagctttcagtgagctgagatcctgccactgcactccagcagcctgggggacagagcaagactctgtctcaaaaaaaataaaaataaaaaaataaaaactagaaagaaaatcagcaaagatgtagaagagctcaataacaccatcaaccaacaggatcaaatccacatttacaggacactccacccatcaatagcagaatacacattggctcttttttgttgtttttcttttccggttttactaggtgcaaggggtacatatgcaggtttgttacatgggtaaattgcgtgtcacaagggtttggtgtacagataattttaaaggaatttaaattatacaaacttttctctgactacaatggaatcaaattagaaatcaataacggaaagacagcagaggaaaaatcatcagcataatacccgataggtgctttttcaatcatcactgtcctcccaccctccaccctcaataggccccagtgtctatttttccctatttgtgtccatgtgtatgcaattagctggttttttgctcctgcggtaatttgtttaggattatggcctccagttccatctatgttgctgcaaaggccatgatcccattttttatagctgtgtagtatttcatggtgtatatgtaccacatcttctttatccagtgcactgttgatgagcactggataaagaaatctaggttcattccatgtctttgctaacgtgaatagcagtgtgatgaacatgcatgtgcatgtgtctttatgacagaacaatttatattcttttaggtatatacccaacaatggaattgctgggttgtatgggaattttgctttaagcttctttgggaaatctccagactgctttccacagtgcctgaactaatttacattacccccaatagtgtacaagtgttcctttttctccacaaccttgttagcacctgttgtttttgactttttaacaatagccattctgactggggtgagatggtgtctcatcattgttttgatttgcatttccctaatgattagttatactgagcatttttttcacatgcttgttggccgcacagaatatacattcttttgaagtgtccatgcaacatataccaagttggactatatccagggccataaaacaaatattgataaatttaaaagaatataaattatacagaatgtgttctctgactacattggaatcaaactagaaataaataacagaaagatgacagaggaaagtcaagaaactaagcgaaaacttttaaatactctacgagtcaaaaaataaatctcaaaggaaatttaaaaatacactgaattgaaagaaaataagaatacaacatatcaaaaatttctaggagagacaacccacagaatgagagaagatatttgcaaactacccctctaacaaaggattaataactagaatatataaggagttcagacaactctataggaaaaaagagttcaatagtccaaacaaaaaatgagctgatctgaatagacatttctcaaaagaagacatacaaatggcaatcaggcttatgaaaggtgctcaacattatgaatcatcagagaaatgcaaatcagaagttcaatgagatattatctcacttcagttaaaatagcttgtatgcaggctggacacggtggctcacacctgtaatcccagcactgagggaggccgaggcgggcagatcacctgaggtcaggagttcaagaccagcctggccaatatggtgaaaccctgtctctactaaaaatacaaaaattagctgggcatggtgggccatgcctgtagtcccaactacttgggaggctgaggcagaagaatcgcttgaacctgggagatggaggttgcagtgagcagagattgggccactgcactccagcctgggcaactgagtaagactccatctcaaaaaaaaatggcttgtatccaaaagacaggcaataacaagtactggtgagtatgtggagaaggctttgtacactgttggcaggaatataaattagtacaaccaccatggagaacagcttggaagttcctccaaaaaaattaaaattgagctaccatatgatccagcaatcccactgctgggaatatacccgaaagaaagaaaattagtatttcaaagagatatctgcactcctatgttaattgcagcattgtttacaatagctaagacttcggagcaacctaagtgtctatcgacagatgaatggataaagaaaatgtggtacatacatacaatggagtactatttagctagaaaaaagaatgatatccagttatttgcaacaacatagatggaactggagatcattatgttaagtgaaataagccaggtacagaaagacaaacatgacatgttctcatttatttgtgggatctaaaaatcaaaacaattgaactaatggacatagtgagtagaaggatggttaccagagcctgagaaaagtagtggatagctgagcggggaggtggggatggttaatgggtacaaaaaaagtagaaagaatgaatatgacctactatttgatagcacaatagagtgactatagtcaaaaataacttaattgtatatttttaagttacttaaagaatgtaattgaattgtttgtaactcaaaggataaatgcttgagggaatggctaccccattctccatgatttggttatttcacattccaggcgtgtatcaaaacatctcatgtaccccataaacatatacacctaccatgaacccacgaaatattttcaaaataataaaaaaaattataggacacagctaaaccagtgctgaaagggaaatttatagcattaaatgcatacattaaaaagaagaaaaactgggtgctacttgggaggctgaggcaggaaaggatcacttgagcccagtagttcgaggccagcctgggcaacataaggagaccttgtctctttaaaaaaaaaaaaaagtacacaaattaataattcaaactctcatctcaagagcccagaaaaagaagatcaaaatacatccaaagaagaaaggaaggccgagcactgtggctcacgcctgtaatcccaatagtttgggaggccaaggcaggtggatcacttgagctcaggagttagagaccagcctgcccaacatggtgaatctctgcttctactaaaattacaaaaaattagccaaatgtggtggcaggcgcttgtagtcccagctacctggaaggttgaggcaggagaatcacttgagcccaggaggcggaggttgtagtgaggtgagattgcaccactgcactccagcctgggccacagagtgagacacaaaaagttgcttctttgaaaagatcagtcaactgatgaacctctagcagactacactgacaaagaagaaagaaagaatatagaaatgtccacagggaatatccctacacaccctgcagacatcggaaaaacataaatggtgctggaacaattgaacattcaagggccataggaggagagaaagacaacaaggaggaagagaaggaggagcagcagtttaatctaagactcataccttctgcaaaaattgactcaatatggattacaaacttctatgcaaaatgtaaaactataaaacttttagaataagataggggaaaatcttctgaatctagatctgggcaacaagttcttagatttgacaccaaaaacatgatctgtaaaatgaaaaaatggatatattagacctgattaaaactaaaaactgttgctctgtgaaagacttgtaaaggaatgaaaaggcaagctacataatggaagaaaatatttgcaaatcatgtatccaaaaaaggactagtatctagaatatataacaacttatcaaaactcaggccaggccccctggctcatgcctgtaatcccagcactttgggaggctgaggcgagtggatgacttgaggtcaggagtttgagaccagcctagccaacatggtgaaactctgtctctactaaaaatactaaaaattagctgggcgttgtggcacacgcctgtaatcccaggaggtagaggttggggtgagccgaggtcatgccactgcactctagcctgagtgacagagtaagactccatctcagaaaaaaaaagaaaaaaaatcaacagtttgaaaaaaattaattagaaaatgggaaaaattcatgaagagacatttcattaaaaggatatacagatggcaaataagcacatgaaaagatgttcgatatcattagccattaaggaaacgcaaattaaaaccacaataagatctcactacacacatattagaatggctgaaataaaaaatagtgacaataagccaggcgcagtggctcatgcctgtaatcccagaactttgggaggctgaggcaggcggatcatgaggacaggagattgagaccatcctggctaacatggtgaaaccccatctctactaaaaatacaaaaaattagccgggcgtggtggcgggcgcctatagtcccagctacttgggaggctgaggcaggagaatggcgcgaacccgggaggtggagcttgcagtgagccaagatcgcaccactgcactccagcctgggcaacagtgcaagactccatctcaaaaaaaataaaaaaaatagtgacaataccaaatgcctgtgaggatgcagtaaaacaatcactcgcacattgctggtgcaaccactctggaaaacactttgacagtttatttaaaaaactaaaaatgcaaccaccatacaattcagcaggtacactcctgggcatttgctccagagacattaagacttatgtccacacaaaaacttatattcatatcagccaaatctggaaacaacccagatgtgatggacagatggctaaactaactgtgctatacccataccatataatacaactaggcaataataaattattgatatatgcaacaaccttgtatgatctccagagaaatacattgagagaaaaaaaagtcaatcccaaaagtgtatatactatatgtttccatttattaatcatttgttttaaaatgacaaaaaaaaatttgtcttgaagtgacaaagtcatagaaatggataagagattagtgattgctagacattaaggagggtatgggatggtagggaagtgggtgtgtctagaaaagggcaaggtgaagaatccttgtgatcatagaagtgttctgtattgtggctgtatccatgtatcctaattgtgatattgtaccatagttttgcaaaatgttaccatcaagggaaactgggtaaaggatacacaggattgtttttattatttcttaccactgcatgtgaatctacaatatacagcaaaattatacttaatgagaatatttaggtttatttcctttaagagtaatgctcattatcaccctactgtttgacacagcattgaagatcctagtcaagcaacatgaaaaataaaacactaaggattaagagggaaaacacaaaacaatgctcgcagatgatactattatctacctggaaaaagagagagacagagagaatatcaataacaacaatgacaacaacaacaacaaaaaccccactaaaaccaataagaggatcgagcaaggttgtcccatataagatcaacttacaaaaattattaatttctaatatttgaaaatcatatatcagtatttgaatatcatatatccaataaagggttaatattcagaatatgtaaagaactcataaaacccaacaataattgtttatacaaacagttaaaaagggggcaaacaaaactttcaaacagacaatttttcctcgagaatgatatacaagtggcaaacacacatatgaaaagatgctcagcattacttattattagagaagtgcaaattaaaaccatagcatcatctaattctcattagcatggctactataaaaatgaaaggaaaaaggaaagaagggagggaatgaaggagggagcaaatgaaggaggaaaggaaagaaggaaggaaggaaggaagggagagagggagggaagaaataagtgttggtgaggatgtagagacattagaacctttatatgcaatgttcgtgggattgtaaaatgtgtaactgctatgggaaacagtacggcagttcctcaaaaaatcagtagtaaaactactatatgacccaagagtccacttctgggtataaatgcaaaagaattgaaagcagggacttaagcagatattttcccccatattcatagcagcactattctcgatagccaagaggtggaagcaacaaagatgaccatagacagatgaatgggcaaacaaaatatggcatatacatacagtagcttattattcagcctaaaaaggaagaaagcactcttacatgctgcaacaagtatgaattttaaggacattaagctaagtgaaataagccaatcgccaaaagacaaaaactccatgattgcacttgtacagggtatctgaagtagtcagattcatagaaacagaatgtagagtgatagtagccaggggctagaggaagagagaaatgaggagttgttgtttaatgggtgtagagttctggttttgcaaggtgaaaaggagttctggagattggttgcacaaaaatgtgaatatacttaacactgctgagctgtacacttcaaagtggttaagacggtaaatgttatttttttaaccacaattttttaaattagatacattcttctacatcagaaattactgattcaaaagtagaattgcaataagataccaatcacaatagcagcaaaagctacaacatgcctaagaattaactgagcatactcaggactactatgaaaaagtaaagtttaaaaaccataataaagagcaaacaaaatgatttcaataaatgagaaaacatcctgtttttgcatggtatgatttagtaataaaaacaagtcagttaaccccaaatttctataaattcagtataaccacaatcaaaattcaagtggggaagacagaactagaagtgagtgtcctcccaaactccccagtaggaaactacaaacttagtttctgttgctactatgcgcttgtcattgtccaaggccaaaagaagcccagattttgcacctctctctccaccccacaacattgacgtttttccttcttgttgtgaatgtacttcctgtcctccatctgtccttctggacccactctcaatacttctgcacctggggtctgcctcaggtgctgacctgcatgacattgaatggctcccatgctccctggcttcttcttgcttccagcatcagcctaagagcagagggaagaggggagtgaggtcagtgtttctaatcccttggcttcctccctacaaggtcaccttaagctgttgtgtcccttgactgaagggcactgcccttggcaaggtggtgactgtacagggcttgctgtccttctgagtcctgataaccccttctgtccccggcctctttggaccttggggtagtaacagctatcctccacccagttctttgtaaatactttgctaataaataaactttccttgaaatgtcctatttcgagtatgccatctgttttctgttgagactctgatacaataaaagccatttctttattccctgccccagaccagcacggccaggggcctcttggaagcctcatatgaaatggaagaggaagggtctggagaaacaaggagccccccatctgggagtagtctctataggtttggggcctctccactctctgaaacccctggagactggtctggccaagtagtggcaggaagcaccacggagaaatcccccatgccttgcttcaaggcagttggagggctcttgggaatgacagacactcaagccaaaaaaaaaaaaggatttgaggatggggttgaactccaccctcgtttttcatctgatttgcccaattttactttggaaagagaaaaacttgagaaaatggcctaaagataattttcataaatagacattgggattaaatgtcaatcttgtctgtttctttcacatgcatgtgttcgtgggtagggaggcaaagagaacctggaacctaggaacatgctctccctcagggaaaaaaaaaatgccaaggataccacctcccgtggtgtatttgagatttattctcattgtctttaatggtcaaaagaagaagctcaaatgtggggtcaacgcgtttctctaaaatattgttatctgccccaagtgttgaaggaactccctgcactgtgtgtgcccttgttaacacaggcccagttctttcatgggaggggaggtggactagatgacctttaaaaccaattctagctccaagttcagcttttaaaacaacaagacattgaagggcgaaaacaattctttgtgcagcttggattatgtataacccgaaagtccagctctctctctcttcccccgctcccctccctccctctctctatgtccctctccttctttctcccactccacttctctcctctcacccttttgctccctctctcttactctcttccactccttctctttttttcctctctttctctcacatgtgctcaagtgcacacacacacacacacacacacgcactccttttttggcaatccattatgtttacattccattctcctcatgcagcatccattctcttctcctcatcctcctacaattggtgcaccatcacccttcttccaccttcctttcaagtaccactcattcccctgtgtaagaactcccctttctacctatagtattctgactttctggatcctagcagacctacatatacttttccctattccttacctggaaggggacagcctttcctataaaacaaaaaacctacaaagttagggcagagaaaagcctgcactggaaatctctagaaaaggaactggaagccgtcccattagctaactctctacttcctttctctgggatcctgccactttgattcccactgctgtgactagaactagacccttcagatctgcagcttctcctttaaaactgtccagataggcctagtgcggtggctcacgcctgtaatcccagcactttgggaggctgaggcaggtggatcacttgaggtcaggagatcgagaccagcctgaccaacatggtgaaaccccatccctactaagaaaatacaaaattagccaggcatggtggtgcacgcctgtaatctcagctacttgggaggctgaggcaggagaatcgcttgaacatgggaggcagaagttgcaataagccgagatcacgccattgcactccagcctgggcaacaagagcaaaactctgtctcgaaaaaaaataaataaataaaataaaaataataaataaaactgcccagatatagacaaggcccaaagccccccattcctagactaaactagaatttcaaaaggaatttgctttgtcaaacaaacaaaaataaaaacaaaaacagtgaatagaaaaaatgaaaatgaaacataaaaatggtaaaatgtagagattaagttccttccactgacttcttctgttaaccccttccagaagagatgctctaattccaaggatgcttctgaagaaattatggaggtgttccaaatcaactcatttcttggtttctttttcttacccatattctagtatctagctctaattccaaaaacaattccacaccctaggtttctgtgtccagcaggtgtcgcccttcgtgggacaacaaaccaccagccagcatcctctcttccttagggtggagtccattcccccaaagggctctccttggtcttggggtagaagggaatggaacggtggctctgaagagatgtgtgctcaccagcatgagggtcttcagaataaagtaatctgctacttccagctcaggtagacaaacatcctacagaaatctgttctttgaccttggacaagtcacttaaatgtctctgagcctcacatcttttgtctgtaacatagagggaaacaatctgtcccttgtgtggttattgtgagaagagaatgagctacaaatataaaggtctgagaccagtgcctaagacataataatcactcaagctatgttcccttctgcattcagggtatggaagaaataactgtctagaactcaatctggagttaagctctgtcccctgaatcctgaggggtatgaggggtctgccttacggttgtgatgaggatcaaagcacctggtacaatgcctggccagaaagttgaataatcgaatatagctaacgtcactattgcaggctggctatgtgcctggcggtgttcttagccatttacaagtatgaactcatttaatcctcataagatcctgtatgaggtgagtaagctgttaattcccttccttgcccatactctgtgactccaacccaccacagttgaatttctccttatgaattataaatcagaaaacggccccaaattctgtcatgtctaagtgggaaaatggaagaaggcattgatttctcccctactcaagcagaagagaattaacctcagtccctgctttgcccatattccttccccagggccccaggaagaagacatggaaaaacaatatttccaccaaagtttatttctctgaaacaatcaccagttgctgtcctctatggcacactgagagccccaggagggtctttaactcccttcctcagattatattcatcccagaaatatagccttggacaataatttggttacagcatagtcccaggaatgaggtcccccaagttgctaagttttacataggggagactgggaaattcaaagaattggatggagaaaccataggatccaagataatgtcagggggttgaagatgttggagaggcatggtagcatcattgagtttgaatctccttctcacttggagtggaagttgtaggattctgcctctaggaaatgtgccatcctacagaataaataaaagggagataatgaggcttcaacccaacttgcccccatcgtttgtcactgtaaccatcccatgccttaatacagtgatactgaaaactccagggcaccaacaactaatacaaaggaagcaccttcagcctcctctccacagacatcccacttggtagaagaggaggatgctccttcctgctcttaatcctagcaatggcagcttaaatcatgcccttgcctagatcctcatggaagctcacccatataataatcaagattagttgaacccaacactgacccctctaacccgcacccctaccaaagggcaagtagggaaacagaccaacagagatgttaccttctgaataattggacccaggaagaggagtgtaacctaagagaggaagatacttgattataccagtctttgtggatgaaaatatctagcagtattcatagcaaatgcagtaggaaggagagagttaatcacaaacagaaagtaagcagagagtgggaccaagagtggggatgggagttcagcgagtcactcactagagtggccagctctccgccagctgatcacaccaagagagaagatgatgaggcccaggcccagagtcactgcagacacagaaaccttcagggtctgcatgggggacagcccaggtgctgcaaaaaatagaaacttacttgacccagtttctgttgctcacccccagggcaattccatttattgcagccacctctcagtgggttaaaaggtcctttatcccagctccaagggtctagctcacaccacccactcccaagaaaatgatctttctcaaatcaaaccctcgtcccatggacctctactcctagagtaagcctggggaatccatctccccagaattagcatcctggcttccaggtcctctctaatacagtggggcctctcaaggcatcctctttccttcctttacctcaaagccacccttatcaggataaagggctcctcactgtcctctccattgcccccacggtaacaatgtttgcttccttactttctccaactgagcagcttcctattacactgtcttaccacatgtcttaacctccagtggatccatcctgtgagttatcctactacttgtgtaccttctacatctagatctcccatgtgtcctttcagagcttgtctccatcccactccacagcccctgcacttccttgggccggtcctgttctgaatcatgtcccactcagattcttttcccatgataaaatgaacactccatttctaaagggaggctcttgtgcacgctgtgaggagacgttccccaggaaagttcaagtgagcatgtgatttccactctcttctctgttctccattcccttcccaactgcccagcaagaaacaacacttcccacaaggggaaacctggttacagcagctgatctgagatcctgttctctggccctttgtagacacccttcctcttcctcatttcttcctctttcttttccaagagtccccaaagctgtgtgcaacttctcacgatacctttaactactcccgacactgagttcaaacagtgtttgaactgtaagtaattctttatccactggcccctgagcatgcatgccaaatggtctgccagccgtggctttactactcccgtatgcttggtagagcaggccaaatgcagtactgccccacaccaagaaaagccccccttcttcaaccttcatcattccttcagctcccatctgcttctggcaccagaatagttgaaatctaaggaggctagaatagtgtattacaatttggggttctgaaaatatgattgccaaatttacatcctcatttcaaagcaagcacgctcccctctcaccctcaaacatagacgcagcaacatcaaccacaccaccagagcagcaatagcacagactaaatattaaactggtgcaaaagtaattgcggtttttgccactgaaagtaatggcaaaaactgcaattacttttgcaccaacctaaatatttccatttctttatcccatttccccattctggtcctaagccccccgtaagttcctccagactcagtccccattttcagcacttcgctgtctaccatgtaccatgtatcgatccacatctcattttctctgctttgaccctaattccatccatctgccatacacttactccagtcccgaaggatgggctcaggagccccaatgtgctctaccacacaggtgtaagtgtccccgtaagagggggttaaggctaaatgggagagggtctggtatgtccagtctccattgggctgggcagtcttgtgcgcactgctgtgaggcatgacaagcttcccgttcttcctccacgtgatagtcacttctgctggatagaagccccacacatagcaggccagcatcacaggctccctcgtgttaaaaggagtggttttggctacttgcacagatggtggccctgcataggagaaaaaaacatgtttaggaaggagggtgacattctggctgcttcctcaacctggtttcttccctatcgcaactcttcgtagattttgcaacccactttccaccccagccccctctgccatgctgccccttgaaggggaaccgttagaatgtattcctgcattactctttcttctctcccattccttcattgcccctttctttctttcctcctccagaattatgtttgattacaattagtaaaagccagatctgaactgcaagctgttctagaagttgttgtatttatttcaagtacataaactggaaagtatttgaaataaggaagctaagagtaatccagagttgtacattgggtttttttaaggtggaaaaggaatttttctccaaatcttgtttaatacgttcttttgctagttaaagctttttctcctcacatagttcaaggaaacaagcctaacttaggactcactcttaaatttggaatgaatgtagtcaaactaaagagattgctaatactgccatcttttactaatttactctcctaggtgatcctcttgcttgcctctatcttgacatttttcaaacacaatcttaaataaaaatccaaggaattatgttaaaatgcagatttcctaggctgtatccccagatactttctttcaacagatctggagtggtactaaggggcttgcatctttaacaagcacctcctccaggcaattctgagaaaggtggttcagaaaccacccttgagacacactgttctgtactgtggagatcttcaagtttactttcacaaacttcaagccattgtcaatgcaagagtttaagggtgagaaaaagcatgtgtcagaatcccctgggattccaaatattcccatgcctgggcccacatcagatctggaacatcaaaatctgggataacaaggcaagaacatcttgggtatgcatcctgagatgccccagcctctgcataagctccccacatggcacctcgcggttcaagcctcacctccccttctttactcctgttccactcacgtcagccaccttgttccccttgaggttcaatcctccgtctttctacatttcagatccacacattttctcttatttgctgctcaaatctcaaacccctgggccactgtgggatcctccctggcctgccctcctaactgcacttcctggtagcccctctgcacccctctctcctcacgtgtcctgttggtcagtgatccccagaagggctgggtgtgtgtggcacaattctgaagcccattgcgcaagcgctgcatcagggtgtctttttggttgaggtgctgtgagaggacattcgccaagctattcagcaccccaaattcgcaaggggccatcttattctcctctggatcccagcaggtcagcagatccttgttgaaggagatgcagtatgtgaaatcctttggagtcccagcatcatccaacagacaggtgctttccacatgggccacgaagccacctagaggagccagggaagggagaacaggtcaatgtcttctactggcctggcaataaataaataaatatataaataataaatatacacaaataataaatatataaaacatacagacgtatatttaggagctctgcacagagctttgtctttgaccctggttcctgacatagagtgcctaatcgcttagaatttcctagataacaggagtgtcttttgttctaatgaggtactcttggtgggctcctgcaggaggggctggtcaccagaaagaccaagtcatgattagaagtctggaacttttagtcccatcccccatactccctgaaggggaaggggctggagattgagttaataatcagtcatgcctacatgatgaagcctccataaaaatcccggaactatggagttcagagaacttctcagttggtaaacacatccacatgccaggaggtgaagtaccccaattctgtggggacagagctcctgtgattgggacccttccagatctggtatctcttcatctggatgttcctttgtatgctttaaaatatcctttgttaaaggatgcaaaattatgatctagtgttctataccactgtgggatgactgtcattaacaataatactttatatcatttcaaatcgctagaagaaggatatggaatgtttccaacacaaagaaatgataaatgagatgatgatctgatctgatcactgtacattacatgtactaaaacatcattatccaccccatgaatatttataattattattatcaattaaaatatcctttgtaaaaaatctacaataataagtaaacttttcctgagttccataagccactttagcaaattaccaaccccaaggagggggtcatgggaacctctgatttgtaggcaagttggacagaagatgtgggtaatttgggaacctactacttgtgattggtgtctgaaatggaggcagtcttatgggactgagtctttaacctttggtgtctatgttaactctagttaatgtcacaatggaattgaattataggatatccagctaatataggagaattggttggtatgagtaaaaaaaaaaaaaaaacctcacacagttggtcaaagaagtgttgagtgtgagcatatagaagaaaaaaagttgatttttcctatattcagctcagaacctaagccttggtgacatccagctagtctggcacagatttcctgctcagggaacatctactgaccaagctcatacactgaagtttctgaaagtctgatttgagggagtcagtagaagtagtagataagtttttagatccagtctcctctttatgcaagactaagcacagggataggagtagccccccgagattatttgcatgtttaaacatgacaatttgcccagaacacagaccttcagtaaggcaaattattgagagagaaaaagggtcaagagaaagagtcagccttgtattgtgctggaaatattaaatattcacttcgcacatatttatgaagcacttgctgcatgcaaggcactgtgctaggagctgaggaggcagcaataaataagatgaacattgtccttgcctatattccagcagggaatatacactgcacagataattatacagattaattacattaaaattgctacaaagtacaaagtgctataggaatgtataccagggagacaaactatctggggtgtcaaatgcaattacaaaacggaacacccttaccctgaaacaggagcaggggaagggagagtccccagaagaagtgtccttacctgctcctgtgcagcccaggctgagccccagcagcagcggcaggaatgtgatcatgctctgctctgtaaagatgccgggagttcagtcccctggaccagctcttccagggtccgtgggtcctcgcctgtcccagaagccccagcctgggtagatgatctccagacactgagcagaatactatattgcccgggtcccttgaccccccaaatgagtgatgtggggatacccagcccctagatattaaatctgttccttccagctcacgggagtccagtgtcccaaacagggacagattggctaggtaggcagggacaaatgtagagacaaatcactgagtgcctcagcctagcatcatcagttactaggtaaacgtcatcctgccttagtcttagacaacaggtctccttgtctctcttaattctttttctgcagaacaaccagtagatttccgtagattactggagagaataatcgcaatattcccaggatgtatgcagcctgggctgcccactggtttaactttttcttctcaatgctctcccaaaagaccaggaccagataacctctcctattccttacagggaggttacccaagaagataattacaaaaacccttgtctgtcctgagatgagaggacccagagcccttctggggcaggtggcagaggcagggctgctgagaaggaagaaggcacagacagagtacagaattgtctggtctcaaagcaagactgcagaataagggaagcagcgccaccatggagatcaggaataggggcctggaaaatccctccatgggcctccattgttgcttctgttctagccagtcaagcttcatttcctcctcagttataatagctgctttccggagctagtaaaccatatcctcctacactctgagcaatctcacggggtagaccgcaggttaacacctctcagactccttgaaaaatagctggtgacgggtcagtgcccagagctcacctgcctttcgccaaactctaaacacccctgtgtgtttcccctactataccctgttccctgggggcaggtccctgcattatgaagccactaggaaaatgagataaagctttcctacttttcttcccctgaaaagacagattttgttttttattttttgagaataccaagtaagattttattttttatttattttaaattattttaacctttgttttaggttcaagggtacacatgcaggtttgttatataggtaaattgtgtgtcatcgggatttggcgtaaaaatttatttcatcacccaggtaataagtatagtatctgataggtagtgttttgatcctcttctcctcccatcctccaccctcaagtagggcccagtgtctattattcctttttgtgtccatgtgtctcatgttagctccactataaagtgagacatgcagtattcatttcctgctcctgtgtaggtttgcctaggataacagcccccagctccatgatgctgcaaaagacgtgagcacgacctttctagctgtggagtattccatggtgtatatgtaccacattttctttatacagtctactgttggtgggcatttaggctgattccatgtctttgctattatgaatactgctgcagtgagcattcatgtgcatatgtccttatggtagaacaatgtatactcctttgggtatatgcctaataatgggattcctgggacgaatggtagctctgttttaaggttcttgagaaattgccaaactgctttcctcaatggctgaactaatttatgttcccaccagcagtgtataagccttccgttttctctgcaacctctccaacatttgttattttttgactttttaataatagccattctgactggtgtgagacggtatctcattatgattttgatttgcatttttctaatcattagtaatgttgaacattgtttcatatgcttcttggtcacgtgtgtgtcttgaaaaggcagattttatgtatttgcgtatttatttttttcacaggttttttttttgaaagtctcactctgtcgcctaggctggagtacagtgggataatctcggctcactgcaatcttcgcctcctgggttcaaatgactctcatgcctcagccacttgagtagctggggttacagtcatgtgccaccactcctggttagtttttgtcttttttttttttttggtagagacagggtttcatcatgttggccaggctgttcttgaactcctgacctcaagtgatccacccacctcagcctcctaaagtgctaggattacaggcatgagccatcgtgcctggcctgaaaaagcagattttaaacggcaattcattcttctatcccattgtgaactatacagttgatggattttccatcactaacttgaaactctaaattggcttccttctgctccccagtaggtttcagggctgcctcttcacatcttagtttctgagaactcttggattttattaaatagtgagctaaacaaaacaggattgtggaaggggccccttgacaccacacttacctgccctccctcaaagtccctgatctcaggaaaatctaacacctatgaagaaaatggggataaaaaatgcatacaaagattattaccaaaaacgaaagattcgttgtgtaactaattgagattaactgaagctctgccatagctcccagccactgcccccactcaccttgcttatatactctaactctgctaacgaactgtcaagtgtgttggaatgggcagaatatggggtggggagtgcataatctgtagagcttctacagatacagtgctaggtaggtcctttctataatatctcatctcatcttaaaagacttgttggccgggcatggtggctcacgcttgtaatcccagcactttgggaggctgaggaaggcatatcacctgaggtcaggagtttgagaccagcctggcaaacatggtgaaaccccgtctctacaaaaaatacaaaaattagctgggtgtggtggcgcgtgcctgtaatcccagctactctggaggctgaggcaggagaatcgattgaacctgggaggtggaggttgcagtgagccgagatcgtgccactgcactccagcctgggtgacagaatgagactgtctcaaaaaaaaaaaaaaaaaaaaaaaacttgttaattgtcctcatttcccaggttggaaaacaggtccaaagattcacacccaaggtctaaaggctgtaactcctcttcttatacagctgttacacatgcacgtgtgtacacacacacacacatacacactctcttgagcatgcccacacactcactacatcttggaactgggatggctcaaataaagggagttagtgaggcctccgctgagaaagagagaaagagaagagtcacaatccataacccaattcacccaagtcttatctttcctgtcctcagagttccttctgctctgagaaccaccgtcccttccactttctcttttgacaagtttcaaaactgaattttcccccacacccccccaatacatttccccctcacattcctccccatcctgcccaggtaagctgttagcctaaccttataggaaccaagtcctgggatccttttcaatgtctacaaagcctagccctggcaagggagcactggctgtgtggtcctgtgccagcactgaacatggccctagccagtaacagtggggctgaatgtagttccctcttatgtctagatctctgctccggcagtcaaaggagatgtgaaaccttctgtgaggccacaacaggaaatggtaggagaggatttcacttctctattaattcaaacactgagggagctttttagaataaagaaggacagaaaacccagacacctgtgctcagcagtgttttccttcctctcctcctcccaacccttccatttttacagatatagctctgtctttccacctctagccaattcaaaataacatttcagttgctctgtccattgttacttatttgttaattattgatatagcaccgggaccgaagaggtatggagccccaaccaggttcccacatgttgcctttcttttattgcctctacacaaccacccaaagagtgagtcctctcctttcccattgcctctgcccttagcctgaccaccacatgcctgcagtaaactagtcccagggtttgtgtgcaaagcattactgggaaaatacagagtgagaagatatggattctgcccccatatcgctttgcttgtacgtcaattggggagtgagaacaaacactttaaatagtttatattaaagtaagtaagcaataaggccagtggtcttaaaagagaagagagaaatcaccatggacatggtagacagggagtactctcagtcgagagggcctggaatgagccttgaatactgggctggatttgtgttggagaggaggaaggcagttggcattgtaggtctggtgtatagctccacaagcttgacaatgctgtgaggtgccatcagggaggaggtgtcctacgagagcctgggttagctaaaacaaagacaagctacaataacgtcactggcactgcacgttggaggaagtcacaaatgtgatttcttgtttttttctgagagtatggccataataataaatctcttctaggcacttcctaaagttgctccatgtcagttcgcaggttcttggggcagacggttttaactgaagtctccattttataaacacaaaattgctcaaccagttaatcacgcctcatagcataagaccacattcgtgacttcagtgtcttttcaaaactacacacacctacatcctgccaagattatattacttgcccaatctgtccaatccccaccccacccctgccatctaccccttacctcacctccgcccacacacacaccctcctaccctgtcaggattcactgctctagaccctgacctttggattatagtttctgtagtcagttcaccatccttccaacctacagtcaaattatttgaactactagggatagtctatctgatttgccacaactatttttccttttttaattttattttttgccaccacaactattgaagaatgctatcttcatcttacccacgagaaaatggaggcagagggaggttaagtggttgcccagatttacccagatactaagtaataaaaccattacttgaactcaggatttattactttaaatcctgtattgccaataatcaattggaaaataactgaaaattgcctactatttataataacaataaaaaccatagcatatttatgaattaacatatcaaatataagaattttaagaaaaaagaaaactttattgaagtgcacaaagacctgagaggtgtagagatataccatattcatggataggccatgctaacataatgacaacctctccccacatctctaacctaaatgctaccccaaattaaagtaacagtaggtttcaggagaatttaacaactgattatgaatgtacaaggaaataaagtccaagagtattttaggatattttgataaagaaaaggaaaataaattttttgggaaggtggtgaaggaatggagacttgttcttcttaatagtaacacatattaaaaagccaaaataatcaaacaatatgatactgattagtaatgagagaaaagcaaattaaaacaacaaaataccactctacacccaccatgttgccaacatttgaaagtcaaataattacaagcattagtgagcataaagggaaatgtgaactatcttgctttgttgatgggagtgtaaactgtttatgatccctgaattatagaaattataaactagttgggcgaaaaaattaacataggaaataaagcggcatatcccaatccttaggttgagtgctttaagtcttggaagatttcaataaagagaaattaggggcaggttcatggaataagttgaactggagttggacctatggagtgggttaagacaggaacaagatgagcagaatagagaaagctcccgtatgagaggaaagagcctgggcaaatgccctaaaccaaaatcagatataatacctcaaggaagagtgaggaaaaaagatttaaacaagaatagcattcctgctgggaatagtgcgtaatatagtatattagaaaaggggcaccagactagagaggatacctgagtgcttctagagtacttaagtaacagtatcatagaaggtttcatcagagagcatctaatctaagcccatcattttacagatgaagactttgaggcccagagaggggaagtgacttgtctaaagtcacacagcataataaagcacttttaagtcttgcctgacaggaaatatctagataagttggaaaacagagagacagagaaattaggaagaactagaaagcaccacatctagaattactaacatgagaataaaaagaaaaacatctaaaatggagaaaatacaatacttgaagctagtattgaggtatattttcagaaaagagaaagaagtctacgaggcaactaagttctcctctgaagatcaagaccaataatgataagggttagggttattcagcacattttctatgtgccaaacactattttaagcattctgtaggtattaacttatttaagcttcacagcatgaggatatgctgccttatttcctatattaactttttcactcaactagttcataatttctgtaattcgggcatcataaacagtttacattcccaccaacagaccaagatattacagttcacattttcctttatcctcgctaatacttatttgactttcaaatgttggcaacatggtgggtgtagagtggtaagggggacaccattgttatcatcatccttttacagaaaatgacaccaaagcacaagttaagtaacttgcccaagggctcacagctaaacgctgacagttacgattgaatccccagcagtcaggttccagagcccatgcttcttaaccggtacacatgatgctgttagaaatgagatggttcagagacagtgcaacttctcttagggagaatttaatattttcttttagattagactctagtacaatgccaagaacagaaactccctcaccaaataattgccctctcaactttattgccaccctgtcatccaaagcaactcccagaccctaaggaatgcaagaaagaaagcatatgcaaagcaatttaccaccagtggtcatgtgctgccacctttcgttatcttcccaggacagcacctgtgcagttctccttggacagttcactcaggccaaggaacagattgtcaggaaagacatgtgaattctttgcccttccaggctgttttcacttcatgttaggggcttcatgatactgttttcccagaactgacataactgattggtatagcacttgggagcttattcttcccatccctgagcttctgtttctcagttacggtgagggttgaagggagttatatgttcctcagggcagcctatacgagacataaacattttcacaaacagtaaaatacacaacacacacacacacgcacaaaacacacaagcagcttccttaaccattttgtaagcagattattagaaaataactctgccttcgtttctcacatattttgcacaaaccgatagatggaaaaacatcatgtaccgccaagaccagggaataagagctcagctggcaaattaggggttttccctatttccctccctaacgaggtcaagctgtgttcaggttaaggcatgctgaatttgaaacgacaacccactcaagttgagatatccagaaacaaataccatgagttaagaaagaagccacactgatataaagaaatgagatttattgccttgtggggggaagggatgtggttgtgataggcaggccactctgggatccctgggatgcaagcccagggacagcagagtccccaggtgggaaatctacacacacaccccagggatgtcccagagacttcttctaccctaagaggagatcctgggcaggatgtgagaaatctgagcatcctctgtttggatggccgaagctgctggcatcaaactctggtctggaagaatcagtctgggggagagacagggatggaggaaaggcatcaggggatccatcctcctcctccttctcctcctcctcctcccccacaaaggccttgctcgccctgcctgcaccacaccctgcagaagttgatctctccttgttcccaaatcatctccaagcacccttcctacagcaccccatgattccttttttcactcaaagcaattcttgtgacccataactgtgtgtgtgtaactgggtccccaactgggaagatgtgcccccatggtgctggatacaggcccccacacccaagggcctgaggatcgctatatgtccccccatgccacaaaataatcctgacacatgcacgcatgcaccactgtatctggctcccacaggctcacccgccccctccagatgacataccacctgagcaaggcttccggaagtagatgatgagaacaatgcccacgatgatgcccagcacacccaggccaaaggccacgccacacagcacattctccagcagatctgagggcagtgcgttccggggtactggaggaaatgagtggctcagcctggggacctagttagggagcctcccacccagggaaatgacgtgggtgtctgggatgacatgggagactgggatgggcttagggtaggaatggactaaacaaggtaccagtggagaaagaagcctcctcccatggatctatccctttttgcccccaaaaggaccagaattccagggagaaagcctcaccccaataggcaattgctgtgtagcggtcaatttcgtgagtcacaatgcaggagaaaatgtcagaaggttctggtgtgaagtttaagtaagaaaaggcctggaagctgagtccatcgacagctgagacaaaagtaggcccaaatccttccacagggacggaatgatgctgccagttcactgtcagcatgggtgggaagagattactgacaaaacagaccaaagtgttgggcttgccaaactccaggggcttcagcgtgaacacttcagcgataggaaaccctggtggggggattgaagtgtagggggaaaaagagactagtttagatggtatctctgtgtttggaggggccatggcatatggaggggagggcagagaagaacacagtgggtcaggctttgggagacagagatgagcgaggagctgggctctgaagggaggtcttcttccaggcaaggactgcagctagacgtagaagcagagccagatccaggctactctggacccctccaccatgacttccttcagcacttcctgtctagagctcacattgatgtctaaccatgcactgtcttctcactaagacatagtcacgtcatcagatatttccactcttcccatccatcttgctgggcatagtagcacaagtgttaatattcagtaggtatcagttggtacctgttgaattcatcacattcaatacatagttctgaatgcctactacatgctaggtacttcggcccaccaaaagaacacagggtgcagaccaaggctggtggaaaaattaaggtgatgaagagaaccagaaagtatttgagatggggagctggtatcaaggggaattattcagtgtacagatcaatgaggttaatgcagccctcctcccttcactccccagaaaactcctgacctctggacaccgggattttcccatcaagttttggccctatttgctggatcatccactcgcagaactctttgtcaaataaaatggcaggagcatctccctgttcctgagcccagtcagcaaattcgggcaggcgaggcacccgagtgttctgggaaaagtcgaagaagaaaagctggtcctcgtcgtaggcctcagagagtcccacactgggactcccatcctggcagtacactgtgtgcaggaatgtgtggttttgcaggtcatctggccacattggagtaggagctgcaaaggacacagggtgaggttcagggaggtgggagccttctcctccaacttaaaaaacagcaaggtggggctaggcgcagtggctcatgcctgtaatcccagcactttgggaggccaaggtgggtggatcatgaggtcaggagtttgagaccagcctggccagcatggtgaaactccatctctactaaaaatacaaaaaagtagctgggcatgttggcatgcgcctgtagctactcgggaggctgagggaggagaattgcttgaaccagggaggcagaggttgccgggagctaagattaagccactgcactccagcctgggtgacagagtgagactctgtctcaaaacaaaacaacaaaaacaagcaaggcctgcttaaggagcgtgggctgaggtgagaccctttcctgtgtctgttatttagactccccctcccaaagggggtgaagaacaaattatggcatctctccaagcttcccctgcctataaaaaggccagttggcaaaagtaaagagttctactttctaaagtgacagattcaggccaggcatggtggctcatgcctgtaatcccagcactttgggaggctgaggcaggcagattgcttgagcccaggagttcaagaccaacctgggcaacacagcgagaccgtctctacaaaaaatacaaaaacttagccaggtgtggtggcaaacacctgtggtctcagctactctggaggctgaggcaggaggattgcttgtgcctaggaagttggggctgcagtgagccatgattgtgccactggactccagcccaggtgacagaatgagcccgtctcaaaaaatatatatataaaggccgggcgcggtggctcaagcttgtaatcccagcactttgggaggccaaggcgggtggatcacctgaggtcaggagtttgagaccagcctggcaaacataatgaaaccccatctctactaaaaatacaaaaatcagctgggtgtggtggcatgcgcctgtaatcccagctacttgggaggctgaggcaggagagtctcttgaaccccagaggcaggggttgcagggagccgagatcacgtcactgcactctagcctgggtgacagagcgagatgccgtgtcaaaaaaaataaattaaatcaaataaaaaatttaaaaatgtatatatataaaataaagtgacagattcagagtcactgttcattgtgtgtttgggggctgcacaaagacacctagccaaagaagcaagtgaaagcctgcattctgctcaccatgccatacatcctggcatagggctgtatcctcccaaaggggattcctttgtctaattcataccaggccactgtattgactagagaaggccatggatgggtttctcactcttagaagggaaagaggaggaatggctacagcctccccaagccatagatgggactgcctcccactatccccagacacaaatggtaaattggaaaacctgtatccagacatttcttcagccacttcattggcaccaagcgtctctcaaaatgtcttctgttccttaacctaccaggcctcccaaagacagcaatgggagaagtgaccccataactgcataaaataatccctcttctttgaagctcttggcaggaatcgctcagccagcaggaaacctttaacccaatacccagaaaaacagacatttggaggaagagggatcttccagattattcttccattctgccccatcctctacagagaaggaaactaagacacttttcaagaatcacaagataagttaatgatagaaagcagagtagaatcttgagtggaggagtgaaaataacattcactttgttcaaatcccagctctaccactttccaatggtgtgaacttgcacaaataactctgagtctcattttcttcatttgtaaaatggagagaacaatctccgcttcaagagattgtcttaaatggaacatgcaaagcatcactgatatcgtttaccaaccacacatagcagctgtctttccccactcccctgttgtttccactgcctcataagacttcccaccactcacaaagcacagcgcttttcctcacaaagctgagtgggctccctaggttcaggatggaagtaaataggagtaccatcttaccttcagggacggcccaggagtggggtagcagccacagaagtggtaacatctgtagcagcgcagctccttggttctgttcatgacccataccttcttgccacacagtaggtaggagctaccaacccagccaacccagcttccccaactccctccccgagagggtggccttagatcatgttttgccagatcatttccaataggtgcccttgtcattttgtctaaaccaatcagagaagcgtagggtttaacatcatcagtcactggggagacgcctggggccagtaacctcctgaagacttggctgtttgaccagggcagagtatggcatgtaactgggctgggaagcccagtggaggaatgttgcttcctggtggagttccctctttggtttcaagctgtcagcctcagtctgtaagcgaccagctggctcttcagagcagtgccacctcctggcagaatgctgcaatggggaaccgcatcttccccaagtaaacccccagggctcttcggaccctgccttctcctccctcctggctcttcctctttctcaaaaaaacttattctccttcaggcattagctctaattcatttggcagacatatattgaaaatacaagaaattctgggtgttgggcccagggctagaaatacaaagatgaataggcatagtctgccttcaaagagcttagagtctagtgctgggggagggggccaagggataattacacaacaatgtaatgtattcaaataagaatgtgccaagtgttttggaagtcgcagtaattttatgaggatgcggaataggaggaacataatcaggcaggctcctaagacttgaaggaaaaacaatttggccagcagaacatgaaggaagagaaaaacacgccagggcaaagggtaggcagaagtacaaagatcacaggcatccagaggtcctctttggagaccctgtgtactagttgatatgaatgttgtgaaggtcgcttgggtgttcctgtataataggaggtaatggggggtagaaggatgttgtgataagctacaaattcgggcaagggccagatcacgtgggccctgctacgccacaaggaggagcttgcttttacttagcagatgatagagatattaaaactggggaatgacaatcattttagcattttggaaaaaatgttctgattgatatttcaaacaatgaactggagcttttaaagaattgaggcaaaactgctgggcaagagtctatagcataccaagatgaacagttgcacatatacacaccactcctgtagcaatacagcaataatttaaatgacagataataagagcctgaattaagtcataattagaggaggcagaggagatagaatatcaagataattaggaagtagaatctaaagggtttggctactgattagctgtgggagtgggaaggtggaggagtcaaagatatctcagatttccagcatgggtggctgggtgggtggtcagggatggactgaattgaagcagaaaagaatgccatgggagcaggtttacagagagaaagagcctgatcttgtacatgttgaatttgaaatgccagtggaacagccagctgaaactgcatgggagcgcagtgaggcgtgtgggtatggaccccaggtatggtctgaagaccctgatttgagagtcatcagcacaaatgtcgaagcagaggccatgaataagatcacccaagtaaactgtgcagaaggagtgggaagtgaaacaaggacaaaagcatgcatgggctcaaaccccaaacctcataccagttatccaggatccagtcaggagcatttaactactttatgtgcttcagactgaaagaatttaatatagagaattggttacaaaggtgttaaaagggcaagaagtacaaaaaaaaaaaaaaaggagagtcctagaaatgtacattttaaaaaaagattgctatctggaaatcagaagctgccatcatccctgagctggaatctgtaaatctactcattgccttgtgagagacactgtcatagtcagttccaatctactagaaaggtgccacctccttcaaggctagaatccttgagaaggtacttctgctcaggaggctggagtcctgagtctcccattcttcctgctgctacagctacagccaatagctaccagctattgccagccaccgccactgtttagaggctgaagcaggatgcttctcagtttctcttgccttctgatctcccatcagtgcctcctactggcagaatcaaaaaggaagccagatgtccaggaaggctgggaaatacacacctggctgactcctaagctaagcagttcaaaacacagtagaggagggtgtgtgtgtcactgagacaaagataataacgagtacactgaaataccctggtttgtaagaatctggtggcacgaggaccatccagagcactaagaaaagaccaaggtagaagcagatcagagaaataaaaaagaggtgtgccatgaaggagggcaaggtcagcatttttaaatgctactcaaaagtcaagaaaggattgaaaagtgtccttagatttggtgattatgagatggctgacaaatttattgagagcagtttcagtgttgtagtgggagtcaactccagattgtggtgggctgagaagtaagtgggaggtgaggaagaaactgtcagtgtacatgcttcaagtttgttagacaaaagaaagagaaagacagaaggggtgggggaagaggcagtgagaaagctctaatgtggcaatcaagtaatctgagaaattaatatatgtgaatattgtccaacagtgtttctgaggctttcaaaattcataccttccaccttttttttttttttttttaagacaaagtttcccctgttgcccagactggagtgcagtggctacttacaggtgcaatcataactcactccagtcttgaacccccgagttcaagcgatcctcccgcctcagtagctggggactataggcacatgccactgtgcctggcttcatatcctcttttgataaacaagtaatagcagcagtaatagccaaaaacaaaaacaactctatgacctcctagatattctggaacagcaatgtgtatatatgtgtgtgtgtctgtgtggtggaggcagggtgccagggaaggactagggtttggaaatcatggtaaccctccagaaaacaaaagaacatttcccagtatcccaacatttatgcactaacccatcagcggttctggcagtggggagattcaggcccctggacagtagaaaagaagtttatgagactaccagtggggagacatatgggacacagccacctagagtcctaaaccaggggttagcaaactttttctgtaaagggccagatggcaaatattttagacattgtgggctatcagatctctgtcatgagtactcaactgtggcacgaaagcctccatgcacaatatgtaaatgaaggagagtggctgtgttcctagtttcctcctagcttttcctcccacttcttgagcatctccttctcagtctccttcatagactccttcctttcagctactctttaaatactggtgttccctggagtttttgtcctcaaccctctttttatttatggacactaaaattcaaatttcatgtaattttcatgtgtcacgaaatattcttcatttgctttttttttccctaaccatttaaaaatgtgaagaccattcttagcttttaggccatttaaaaacaggtggtaggcaagattgtgctcacagcccatagtgtgctgaatgatgctctacacgtggtcagaattggtacgaaagccccaaattaaacccacccttcaaagaggaacctcagtccccttattattggattggcaatcagttaacaaacactttgtgccagttacaccagtctatttggaaggagatctggggaagaacaggagaaactagactgggtggaagggcataggaataggtacagcagacactgcaatttctctgggtgagaggaacaaggcagaggggtccaagttctccatagggagcacagtgtagacaagaccaaggtgaggacaaacataaccatccctcaccaagactgtggtgaggggtggttaactccattctccccttctataatctcagtttaaatggtaacaagttcaaacacttataactactcttccctccatgtaatccttccccaccaggacctcccaactacctccatcataagtatctcaggaatagtctctcatcagtttggaaagtaataattgtgggcaagagatgagcaaggcagccagttctgctttgcagtagttcactgtctactttgtcattagctatgaatgcctctgaaaataatggcacagcaccggtaaatccaggaggctctggctttctaacactcagctctgccatccctttctagcatttaaaaatggactctatttggccaggcgcagtgattcacgcctgtaatcccagcactttgggaggccgaggggggtggatcacgaggtcaggagatcaaggccatcctggttaatggtaaaatcccatctctactaaaaatacaaaaaaaaaaaaaaattagccaggcgtgatggcgggtgcctgtaatccaagctactcaggaggctgaggcaggagaatcacttgaattcgggaggtggaggttgcagtgagctgagatcgtgccattgcactccagcctgggtgacagagcaagactccatctcaaaaaataaataaataaatatataaaaaggactctattttttttcccctagcagagtcagatttcttggaaaagtcatgggcaactgtggccccgctcccattcttaccatttaatcttttaactctcaacaatgcaattgttcaccaatacttttgtgttgccaaatcaaatgaactagtctctgcaacatctgacactgttggccataccctatctcctaaattggtcaaatttctggcatccctgatggcactctctcctagttttccctcctacttttctggcgtccccttttcagtccctttgggactcctttctttcagcaaccctttaagtattggtgttccctggagttttgtcctcaacctttactcttcttagactatacacttgccctggatggtcctctcatttactcccacatgccttctgttaccacccatttgctaatgtcttccaagcttacctcttcagctcagatcttgctctgagttccacactacccatatctgaaccacttctggtcaaatccacttggatgctatgcaatagcagttttttgtttttgttttttttttaaatatggaacgcttcatgaatttgcatgttcttaaactgtattcttcacaatagcgttcctcaagaaataaaaaaagtaagtttgatgatagcaatcatttatttttgaatttatttccacatagacataatgcaacatcaaacacatttatataatattttttattatgtaacaatttattatatttaataagtctatttattgcaagcaatagaaaccaattctggctaacttacattttaaaaatgaggatttattggaaagatactgatctaactcatgaaatgaaagtaatagttgaataagctagcctcaggtagaatagccacagggaccttagaagcaggggttgagttgccattaatatgctcacctgcaaaggcctcctgcctctttatctttcaagttttgctttgctgggagagcctctctcactggctcagcttgtattaggtgtgtaccactggattcattggttgtggccaggtacagtattacctctatggattagagctattcctagagaagggagaatcatatgaaaagtaaccacctcaatacagctattttcaacatatggcatctcagacaattgtatgagatcatctgaggcataaacataaggttaaatctgtgtattaatgctcaaacagcatttcctaactactcaggtgacatatgtcatctgcttgatgatctctggtcggtcacttgtcttatcacatattcaaattacatttatcatgtgattcaatattgatttattaatttaaaattatatattccacgaatttcctttgaatctctgactaaaaaggtttttttaattttactttgaaaagctccaagcacacacagaagagaagaatctaataaactccaatgtactctcatgaatgtcaacaattttcaacatttaacattcttccattcttgtttcatctattgttctgcattttttggagtattttaaacaaattctgtcattacatttcaccagtaaatacttttaggcatatctataatagataataacctttcccttaacataactataatgccatcaccacaaccaacaaaattaaaaattacttaacttcatttgacccaatctgttcatttctcctagttatctcaaaaatgtgtaagagaatgaagttttaaatgaaaagcagtgtcttataattttcaaaccgtgccattagtttaaaaaaattggtgagttttctattttatgtttcataagctattgatggttcaataatgaattctaattaggtattccataggcaaataaagttagcaattgttactctgaatgtatctccatctcaagattacaagagtacactcatcactttcccttcccaatatattccaactcctctcttatatttaagacttcagtgaataacaagatgtccacccgagctacaaatgtgggtcatcgttgatgaccccatcttcctcaaaccttcccattcaattgtcctaacaattctacctttctaatagctcttgaatcttcctttcttttccttccattcctactggtccaggccttcaatggttggttttcactgattattgcaactttctttataattggtctctctctctccaatcttattattttccacagtgctgccagaaggatatttttattatgcttagttgatcatattatacttctgcatgaaaaccttccatgattgttaatgatctactttccttgtcatgacccataatgacctgaagtctacttacctacttctatatgtcttttcaggtgaaatctcactcctctcaggaagccttccttgaacccagagttgagattaatagcctcttcagtacgtttccaaagcaccctgtgttggccattatcactgttttaattgtattattctcttccatttatatgtctgtttcatagtcacctcatctctactgcaaggtccttaggggagggtgtactatatatatatatatctccaccaagaggcccactaagtgacctttcactcgatgaacaaatgggctaccagtctctgaaggtgctgaactgagaatggaagagccttcaggtattagatgatgatggattgtcccttctaacagatgtttcaaaggtaaatcttatcaggtttatctataagccattcttttttttttttttttgagatggagtttcactctgttgccaaggctggagtgcagtggtacggtgtccgctcactgcaacctccacctcccaggttcaagtgattctcctgcctcagcctctggagtatctgggactacgggcacgtgccaccatacccggctaattttttttttttttttttgtatttttagtagagatggggtttcactgtgttagccaggataatcttgatctcctgacctcgtgatccacctggctcggcctccctaagtgctttgattacaggcatgagcaaccacacccagtctctatgagccattttacacctccacagccttccctatatactctactacccttccaattccattctaggcccttcccaagctccttgccaactaccattttcttcctactccctgccacctcctgtttcagagagcaaacctagccatccagctcccacatttactcttatttctacctcagtacatttctccatacccatattcatcctcccttttagtgacattactatgatgcagcaatccttacaactactctacaaggttataatttattatccccattatataaacaagaaaactgggactcagaaaggttcatttatttagcaaatatttattggccaccttctgtgtctagcagtatgctctgtatcagatacctgccatcatcacacttaaagtctaatgaaaataaagagacattaaacaagaaaacatacaaatttataaactaaaaggtccacacacacacacacacaaaatctcttagaattgataaattcagtacagttgcaggatacaaaattatcatataaaaattaatggtgcttctggatacaaacagtaaactagtgggaaaagaaatcaaagaaagtaatcccatttacaatagctacaacccctccccccaccaaaaaaacaaaatagaatacctagaataaaccaaggaggtgaaagatctctacaaggaaaactatgagacactgaggaaaaaaactgaagaggtcacaaaaaaatagaaagacatcctatgtcttcggaagaattcgtatcgtgaaaatgactgtactaccaaaagcaatctacagatttgttgcaattcctatcaaaatacaaagatattccttgcagaaacagaaaaaacaaacctaaaattaatatggaaccacagaaaacacaaatagtcaaggtaattctgaacaaaaagaacaaagctgtagacatcataccacccaacttcaaaatatactacaaagctacagtaactaaaagagcacggtactggcataaaaacagatacacagaccaatagaaccgaataaaggacccagaaataatagatccacatcttaacagccaactgattttcaacaaaggtaccaagatattcaatgggaaaaggacacactcttcattaaatggtgctgggaacactgaataacaatatgcagaaaaatacaactacacccccatctctcatcaaatacaaaaattaaatcaaaatggattaaaaacttaaatgtaagacctgaaactataaaagttactgtaagaaaatactggggaaatgctcaagactttgagcaaacattttttggtttaagacttcaaaaggagaggcaatgaaagcaaaaatacacaaatgggattacatcaagctaaaaggcttctgccacagcaaaggaaacaatcaacagagtgaagagacaaccttcagaatgggaaaaaatatgtgcaaactatccatctgataagggattaataaccagaatatataaggaactcaaactcaacagcaaaaatcctccaaataatcccatttgaaaatgggcaaatgatctgaatagacatttctcaaaagacatacaaatggccaacaggcatatgaaaaaattctcaacgttactaaccatcagggatatgcaaatcaaaaccacaatgagatatcatctgaatctaattaaaatggctattatcaaaaagacacagataagagatactggtgaggatgcaaagaaaggggaatgctcatatactgatggtagaaatgtaaattaacatagccactatggaaaacagcataaaggttcctcaaacaactaaaaatagatctactagatgattcagcaatcccactgctgggtatatatccaaaagaaaggaaatcagtgtatcaaagagatgtgtacatgcccatgtttatttcagcactacccacagtagccaagacatggaatcaatctaagtgtctatcaagtgactggataaagaaaatgtggtgtatatatatacaatggatactagtcagccataaaaaagaatgaaatcctgtcatttccagcaacatggatggaactggaagtcattatgttaatgaaataagtcagacacagaaaaaaaaatatcacgttctcataagtgggagctaaaaaagttgatcttatggaggtagagggtagaatgatggttaccagagactgggaaagggagggggtggaggggggatgaagagagattcattaatggttacaaaaatatagttaaattgaaggaataaattctatagtgtttgatagcacagctgggtgactacagttaacattaatttactgtatattccaaaatagctagtagatttgaagtgctcccaacagaaggaaataataaatgtttgaggtgatggatatcctaattatcctgatttgatcattacacatcgtatgcatgtatcaaaatatcatatgtaccccataaatatgtacaattattatgtatcaataaaaaataaaaaaaaacaattcagaagtccataaacttggatggaataaaaaaaagtcaactttattttcaaaaaactctcactgaaatctaattttatgaatgtagaaaataaatctttgtagtaccagccagcagctgtaacactgtcatcaatagaaaacaccatcaattaatattttcatatcacattatagttgttacagacatcttaaaatatcacttacaattatgggagctgttaaacttgccaaaaaatcatgctttttaatgtattagtaaagaaacactgtattgtattaatacagaaacacatactactagatcatcacacgtttctttgaatatagtagtgtcccccacacagcaccaaatgtgattatacagtttattcctatccatagatatacctatgataaagtttaatttataaatttgcacaggaagagattaacaacaaaataggacaattatattgtaataaaagttatgtgaatatggtccttctgtctcatacacaaagtatcttattgtacttattttcagaccaggttgaccttgggtaactgaaatcacagaaattgaaactgcagttaaggggggaccactgtattttgataactatagtttatattttattttatgcatttacaaatattatcagacaagatccaaaggcttcaccaaactgccaaaaaagctaatggcacataaaaagcttaaggagtcctgatttaatcagtcattcaatgaacatgacatccttcctggaaccatctcctgttctagcttcctcacattatgttgctctgcttctccttgagatcttccattggttccacttcctattcttgcttcctgtatgaagatgtaacccaaagctcaatccttcaccctaaattgtttttataccccctcttttacaaacctcagctaccttcgtggctgattcaaacatcacctcaaaggtgactctcaaatctgcttttcctaatcttttttctctaacttcaatcttggatcttaaactccctgctgtgcctagtaaacagaataatatgccacccagagtcagctgggttcaaatcccagttctgctacttactaaaggtgtgacattaggtaaatattacctgctatggtttgaatctctcctccaaaactcttgttgaaaataattgccattttgacagttttaagaagtgggacctttaagagttaattaggtcatgagggctctgctctcatgaatggattaatgctactaatgtaggtatgggttcccatttaaaaggggacattctgaggccgggcacagtggctcacacctgtaatcccagcactttgggaggccgaggcaggtggatcatgaggtcaggagatggagaccatcctggctaacacggtgaaaccccgtccctactaaaaatacaaaaaattagccaggcttggtggcgggcacctgtagtcctagctacttgggaggctgaggcaggagaatggtgtgaacccgggaggaggagcttgcagtgagtcaagattgcactactgcactccagtctgggcgacagagcgagactccgcctcaaaacaaacaaacaaacaaacaaacaaagggtacattctggcctctattctctctccatctcatgtgcttgtttgcctttctgccgtgggatgatgcagcacaaggctctcaccagatgccaatgccatgctcttggacttccaagcaactggaactgagccaaataaactactgtttataaattacccagtctgtggtattctgtgatagcatcagaaaacagactaagacgtcctttgcttctgttgtttcatttgaaaactgagggtgataatattagtattgactttatagggttataaggattaaaagagttactacatgtactcattgcagtacctgacacattttaactactcaataaatgttttgtatcaccaatcacatctccttccaaccccgacattttaatttgatgtttattaacatggacggtgccagccactggaagacagagtttctatctaacaacataattctgatcaagtcattagtcaaaaaatttcagtggttccccactgattccaaacttaacagcactggaaaccttctataatgtgttctctaatataaatttacctcccattttctcttctcctgctctacttcttgtagcttatgttctggccagactggactagactactctctgtgacaataacctgtgctgttctatgtctgtctttcctcacataattctaatgtctcaggtttgaaggcaataattttgtctatgattattcccctatacatggcaccccataaaacatacacatttcaatcttacctaagtcacatacttacttacacatcaattcacctccatatttgctcaatttgtgagaacctaatattggccagatactgtgctaggacctagggatattaaaaaaaaaaaaaaagcaaagcaagaaaaagaatgcataatggccctgctctcaaaatcaaggtctagtactagagagaaacatgtaatcacataaatgccattcactgtggaaagtaaaatcataaggggaagggacaccaaagaatgagcagttagctcaacttgaacagtaacattaagcttttcagagatgttatttgggcgtacatagattggggaaaagtctactccatatagaaagtgcacatgtgtaaaacacagaggcatgaaacaaaatgatgtgtctgggaaacagttcaatacagctggaatatagggcccaagaggaagtggttagacatgaggctggaaagctaggcagactgttttggcaaacataggaatttggactttatcacatagccaataaggaataacacagagttttaaaaagagctatggccagggctatattttggaaagctctctcctggcagtattgtggcagaggcagagaggaaagtctaaagcagcactgtccaacagaacttcttgtaatgaggccgcgcgcagtggctcacgcctgtaatcccagcactttgggaggctgaggcgggcggatcacgaggtcaggaattcgagactaatttggccaacatggtgaaaccccgtgtctactaaaaatacagacactagccgggtgtggtggcaggcgcctgtaatcccagctactcgggaggctgaggcagaattgcttgaacccgggaggcagaggttgcagtaagccaagactgcgccactgcactccatcctaggccacagagcaagactccgtatcagggaaagaaaaaaacaacttcttgcaatgacacaaatgttcaataatctgtgctttcccatatgacagccactagtcacatgtggctattgagaacttaaaatgtggctagtgtattgaggcactaaatttaaaattgtattaatttaaatccaaatagccatgtgtctagcaaataatttaggagactgttggtatagctcaggtgatagaattaggacagaagggtgagttgatggatagttaagaggcaaaattatgagtctgtaagggtgtgagaaaaggaaatcaagaacaggctcccagattacagactttgtggttaaacagccaccattactcaggacaacagaagagaaagagcaggtctagagtgtatagtgatttcatcaattttgaacatactggtgtctgagagttatcccagtgggaatatttagtagaaagtttagcttagagagctgtctgaactaaagattcagacttcagaggctttgagccatggagtcagattacctagagaagttgaacaaaattagaagcaaacaagaatcacagcaaatatcaacacataaaaaggggctaaggaagaaaaatctactgagactggagaggaacagttacacaaataggaaaagaaacaagtgagagtggtatagaagtcaagggtagagagaatgtcaggaaggaaacatgatcaaatgtcgaatgcctcagaggtcaaataaagtgagaactgtaaagtgcttcctgactttgccagttaggaggttcttggtgacatctgccagaaaagttttggtggtagcagcctgacagaggtagcttgaagagtggggatggggaaagagaatgtgaccaagaattgagatagtaaggataatttcaatttcaggtcttggctgtgcaaggaagccgagagacatgagtctctaagagggcacgatattgagagggttgttatctttctgtcagcggggaaaccaagagaaaagtttaaaaaggtcaaaagggggagaagggaagacagcttccgggtaacagagaaggttgaccaggtcaatagtaaaggatttcctcaaaccgaagggaggacctctagtgaaatgagaaaggaatacacaattgacccagtttgcaggtgggaaatgggaagccagttctgcaaattggcctttctgttctgtgaagtgccatctgtcggtgaggagagattagggtctgcagcgtgaaaatctggaccatactctgggtaatcaagggagaggttatcggctaatgacaaattaaaggcttactttttagctggcaactgaatcaccataacattttatgttaccagttccaaaattttggggggaattcactcaagcttgggagaggagagatcataactttaagagtataagaggtttaaacggtccactacgaaataaatagagaaggaaaagttatcagctggtaaatatcgtagaaggtagagcggtccagggactcacaggtctcactaaagaaaagtctagcgtaggttcacggcacggagagattttaaggctgcctaagactaaagccaaatacgaagtccacatctgcggtccgcaccttatctctccgcgcggcaggcgcgacgagggcgagaaactccctctccagtggtcgcaccacacgacaccagggaaggggcccctctctccagaccctcatatctccaggtccaggccccattttcctccgctgacagctcagcagcgtgcgcttccgctggattcaggccaggaccagcgaagccgcaccttacacccaccgaggaggaaacaagcctggccacccgaggctaccccgctaggccgcgggtagtgggggagggggcgctgaggcaggaggtcagcacccgggcgcgggctcccgccccacgaaatgcgcgcgctccaagccccgccgccggagatgcggttccggtccggacgcctgcgcactacggctctccccgcagcctctggccctccttccccctcccccagtcagggcgcacccttgcgcctgcgctgtgtgtgttcctggtctgcggcagccatgctgaactcgtatggagaggcgagtgggggggacagagtccaggactgcgggataggaagctggggatatggacaagcagcagcgttatagcgctctgggtttcgggacataggcctgggccatgcggcccccttggccccttggcgcgacccccaggaacgttcggaaagctggtcctcgtggctgggggaaaggcggggggtgggggggaagcgggcacgtgaccccggtcagccaatctgggtgctgctgacgtacgcgcgcggccccgatgctctccccacccccccagcccgttcgggaagggaggggctgggggctacgccccatcccccagcacggcttcgttttctgggggggggttgacaccccggattacataccccgtaccaagccgagggcaactttggaggccccctggaaggctttaggatccaggtgagaaggggcccttgtggggcggagatgtcagtcaagtgcttaaccaatggtggggagtccgggaggggattcttggggttcaggaaagaatcctgagagtgggaagatttgtccttcaaaccttttacagccaatgggagcgtggagggggggcgagcgggagagggccatggggggggaggggaatggccagcctcatgcctccgtacccattggagggcaaaggggttagggggcggtgtggccccccctattccattcgtcccctgggggtacagcagccgggagccaggtgagaagggatccatcggcggccgagggaggggtgacctggcggtgggctgaggagtggtggctgtggcccctacccgtggatgtgaatgctttaggagttggccacccatgttgtgaactgaggttgttcccaggcgccaacttcctttctccccagagcctctggagggagcattgctgtgcgccctttgtgtccgcggtaggggagctccagtcgtcacaccgcaggctggaggttacgcttcgagtcgcttaccgaatttgtgtgcattcacgtggacacggcctgtggggccttttgcccctgtagggtctttactgagcacgtgtctactccaggctggggtgcttacaagctgaaagcttgaggtctgcttaggaacagaaaccaggcccaaggtgggtgctggcagtagggggtctagacagcatggtctgagatgcgagggaggctcgggacctggaatgatttcacagctcccaaggtttcgggtttctccagggtggcctcttccatcgcctccctcatcccctcccccagtcctgaacagttctctccttgtgtactgcgggggagggaacggaaaggaggaaagagttactttcccaaattactgagtagcagtagcctccctggtgactcatgtgggggaagggaggatagaggatcgggaggcagtgattttccggaatgcagggaataaacgagagcaatgtctggctgcccttttcctaaggcctagtattttctcagcctcctaagtttttactccatggccggccccctgatgggcctctgtcctggcctgcagagccccggtggagaaaagcagatttgggaggttgggccgctagggggaggggaaaaggcctctgcaaagttgctgtgtcattgccctccatgctgcagccacccaaacggggccgcttgtacttttgggggccagggcctgatccctggctgggggaaggggactctgctctcctgacgctcattttcccccgccctcccggggtttgccctactcggggggtcagaagacaggagattggcggccattttagacgcagtaaccgaggttggagttgaagggctactgcagaggagggagggtggcgtggttgcagctcaaggacctaggcccttacgagcccttcccgggcgagggggaatcttaccgtatatttgttcacctacgttgattatttttcccagatacgtacacaagtttgttttctccctggtagcgaagaaaggggaaacgggggaggggacgccccaccaaagcccaggttttctcgggtgggggagatcctttcactctcttgtaagggggcggggacggccccagagatgctctggagatcctgactctgggctctggttgattcacagagtctgcacccttatttagataaccaagttaggaggaagacttaagagtaagttggggggagggggcgaaactgagctcccaaaatggctcctgcccctcctcggaggcggacggccggggggaggggaggaggggaggagggggagggctagtctgagccgcagccgccgcctcctccgctcgccctcctccctggcgctgaccgatggaccagccgctccgtggggaggactccggaccctggtgggggggcgggggggttctttcgcccccgtggcggagggcccctgagaggcggatacgggtgtgcctttgggggtgatgtggcgtgtggggggaaaggtccgagctcgcctggagggggagggtttttcccttaagtcatccctcccaggacttgctttttctgctctgagccggacgccggaatggagtttgaggaagaggtgaggtgtgttgcattgtatagggtagatggatgcgtttggagattttaatcccacttttagggttgccgaggatttttcgaacgagcagaaatgtattggtaactgtaggtgtgagtggggagggattagaaaggtgcttggacgtgcaaatttgggagacgtattttagcttttgtggtctttgggactaaacagtagtaaataatgttttgctcgtctttccatcgtttggcttgagggagggagtggagtattataagactctggcaacactgttttagactgtggggcatgggaacgttagatcccctcatcgccgttctgaagcccgtagctgttcgccatagaggagcaggccgcggcttctaagatggcgtctttttcctcgtttcagattcttcgctgctgctgccttaccgccgagaaccaccacccgccaggcgtcttgcggccacacccctggcgggttcaggcaggctacgcccacgcgacccctcccgtttccctgctttggccaatggaggagctacgaatggcacgacctgctcgagcttggcagtctccagttgggctgtgcatggaagcttgggaagactttgttggaaggggaggcggggagagagtgctggaggctctggggcgatggcttccgcacctcttccaaccaccctctttccctggagtcggcggaccacagctcagccaattggcttggagatgtggcgggttgccacttccctgtgggtctctgcggcactcttctgcctggtgactgacaccttggaaatgaagtttatgacgtcatcgttgcggctggccaatagaaaaagctcccgcggagaggtgttccttccccttcgactcagcttcttcacccgcgtgagcgagcgcgcgcgcgcggagggggtggggaaaatctcaagcagggtggcgcgcatgagcggcgaagctcctcctccccgcctatatataaagggctggcgcggggctcggcggcgccatttcgtgctggagtggagcagcctctagaacgagctggaggattctgcctaccgatacagagccttcgagtcgtccggggccgccattacaatccacctccatccgcttggaaatggccttcgtcccggcctatgactggtcccagcgggcagtacagaccccctagaagcccctggagctcccctttttcgggccccgcccaatcctcggagtctgtccaccccctctactccgccctcaagaggatttcaaagatggaggcggcggctccctaaaccacttttcgtgttcatccgcctccatccgagatcgaaacgggacctcgtcggccccgtaggggcccgacaagaagagggaatccctgcagaccaacagcgggctatattgacgacggtgtctgagatcggggaccgtcttttgaagagtcagtccctccttagttgcccgcctcagctgaggccgccgccattttcttgctgtccgccgtctgcagagcgcgccaagctgcccggagctctccgagaggccccaaagagactgctttcgtgccggccaggcagggggtttgtcgcctggaggcccaagaggaacggcctccccccaacttagcgggttatgctggaccgggcggtgaggggaaccgaggccacccggactttccgcggctgagggcagcgccggttccttgcggtcaagatgctgcaaaacgtgactccccacaataagtacgtttccgcgagccgcgtgtgggaaggggatgttgcagggcggcggcacaggggtgtggggcgccgtgttgggagtactgagcggccccggcgcgctgctgttgcggcgcagctgtcgactcggtcgcgcggagggaattgagcgacggttttggaacggtggtggcggctcggctactgctcgtggaggggaatacaggttgtcaatttatacgctattaatgccgccgtggcccagtcttaaccgagtcaggcagagctagtttgacggtggagtggagtgaggttgaacagcaggtttggcgtttggtgggtctggtatctagcggcggtctgttagccttttaggggggattcacggacacctctagcgccctgtagggttgccatggtgacggagcgcttaagggactggcaacggggattcccagagaagggtaaagggatcactctcccgtgtgtgcaggttcctaatgcccagggcatgtcattaaatcttttgctttctttgggtgggtgggttgtgtgtggtgtttgttggtgcagggattgttttttcctaacattaaaagtttgattcagggcaggagggtagagctaaggttcctagttcagctctgcgatgtaaacaatgagattcccatatgatgttttaattcttaggtggtaggaaagactgatcggaggagcaccagagggactgtaaatgaaccactgttagcgtttggtgtccggagttggtgctacagggggaactggtagtggaatcgtgttgtgtagtgggtgggtggaagggggctatcacttggtgaccttgactgttttgtacggctttttgacttccttggagtgaggagactctgatttggtgcgaataattttgagggcctggaagttacgggctgtgaagtctgacaaattcttccttgtctgaatttgtttttaagttgatatggttcttcctctgggtttctagtctatgttctgttgtggcgtgaactacccagaccttgtggaagatggtgctctctcttctatctaggtggattattctgtgtcttatcagcattttatggaattttttatagccataatttgttcttttcctccttaccggcgctcaaccaccatggcaaccaccaaacccctagtgaggaggaagcttggggtttgagtttcttaactccacccattttgcttaatccccatccccatagggctgtagttctgagatgtcgtgccttgtcagaaacaatttgggagttttttaaaatatgaaaaagaacagatagagcctatcagacttaagaaggtgggatctagatagtatactaaaaatattaataaaaggaaggcggggccagcaataaaagctccacagattgtttggatattgtttctgcttaagaagcacttggcataagcttaaccacctcactagggccagcacctggattcatcagactattgtgcagatgcactttttcctcatttggacgatattgccctaattttgttcccatctttacaggctccctggggaagggaatgcagggttgctggggctgggcccagaagcagcagcaccagggaaaaggattcgaaaaccctctctcttgtatgagggctttgagagccccacaatggcttcggtgcctgctttgcaacttacccctgccaacccaccacccccggaggtgtccaatcccaaaaagccaggacgagttaccaaccagctgcaatacctacacaaggtagtgatgaaggctctgtggaaacatcagttcgcatggccattccggcagcctgtggatgctgtcaaactgggtctaccggtgagtagagacattggagccggggaggtgtgggatgagcaagaatgcgtgtgaatgggggtggtctgcctagtgtagatgctgcggcccctagggagttcccatttctcccctgtagggcagttagctaccagatttctgggtatcttggtcctttgtgattgatccgaccgcttgctgtaactatcttggcatctttccttgtgccctccatgtgtccttccttaacttttgtgccctggctccattttacagattcccacctcgggttgggagaggaccacggtggccaaaattcttagcttcttcctttccctcatgcagcccatggatagccagccccagaggtaatgtcacaggatgggaagtttccagagtgggtgggaggtgggtggttagagaaaggcagcaggggcctccctgtggatgtcaagaatcttttttatttatttatttattttgtcccacagtttaattggggccgcagtttaactgttcctttgatgcatagggggtgtgtgtgtgtgtgtgtgtgtgtgtgagagtcggggatcggtagtctccctataagcatttatttttctgtggttctgacctaacatttctttatttaggattatcacaaaattataaaacagcctatggacatgggtactattaagaggagacttgaaaacaattattattgggctgcttcagagtgtatgcaagattttaataccatgttcaccaactgttacatttacaacaaggtgagtttttctgtgtgttcatttagtaggtggggagaaacagtaatttctattattgctggatatgttgtctacataaagtttaaatcctttgctactgaaggtgttatccaggtagggtagtcggagtcttaaaaacctgactctagatggtactattgaacacagtgatgtgacttcagagctctagttgaaggttatttagaacacttcatacttgggggtggtggtcctgtttcttagaaatcaccagagacctgagtagaccagggatctgttttcttgtcagctctcaagttttttcttctttcgaattttgggagacagttaggagaaagtggaaattagtagtggcctggagtagaaattttctttaagatttgatgacaagatgactggtgggggtatggtaatggcctagggcctgaatgcctctgagaaagatggtgtgtatctatcttctgttggcattttttaactttctttattgctgtctgtgttctcatagcccactgatgatattgtcctaatggcacaaacgctggaaaagatattcctacagaaggttgcatcaatgccacaagaagaacaagagctggtagtgaccatccctaagaacagccacaagaagggggccaagttggcaggtaggaagagtgggagttttgcaaatggacaacttaaagatggggaagagaatcaaactacacttttttccttttttctagcgctccagggcagtgttaccagtgcccatcaggtgcctgccgtctcttctgtgtcacacacagccctgtatactcctccacctgagatacctaccactgtcttcaacattccccacccatcagtcatttcctctccacttctcaagtccttgcactctgctggacccccgctccttgctgttactgcagctcctccagcccagccccttgccaaggtatgatctgtggatttcctctgggcagcagggaggcaagggtcttaagtaaagtgggcttggagtgacaggttccctatcttgtttctttctgcagaaaaaaggcgtaaagcggaaagcagatactaccacccctacacctacagccatcttggctcctggttctccagctagccctcctgggagtcttgagcctaaggcagcacggcttccccctatgcgtagagagagtggtcgccccatcaagcccccacgcaaagacttgcctgactctcagcaacaacaccagagctctaagaaaggaaagctttcagaacagttaaaacattgcaatggcattttgaaggagttactctctaagaagcatgctgcctatgcttggcctttctataaaccagtggatgcttctgcacttggcctgcatgactaccatgacatcattaagcaccccatggacctcagcactgtcaaggtacccactgcatggggcagatgggatgctcaagcagtgatgggagcctaggtgcaaaacaataagtctccttatgtgggcacacagcagtctttggttcttggcattttacttttataaaataatagtggaacagaaggtctggtgttttgagaatttgtatttcttggagtttgaaacagtagggtggggtttctttgtcttgagaaaaatactgtctataattaagtactaatgtggcagtgttgggttaaggaagttatagggtggaaagacaggcataggccacctctctgtcacttagaaatgatttctttttctagacataaatatttcttcaacccacccaaattcctttgacttcaaacttgaaccccagggcacagatccttaaggtcatccccactgtgctctcaagagagggctcttcttgtggtgtctggggttggcagggaaaggtgagtcttcctgcctgtgcagcttctgatgctgcctccttctgcagcggaagatggagaaccgtgattaccgggatgcacaggagtttgctgctgatgtacggcttatgttctccaactgctataagtacaatcccccagatcacgatgttgtggcaatggcacgaaagctacaggtgagtggaaaggttggagtttgaaaaataaatggtatggggagttattttgtcatgtgtgctgcatagcctcaacgtgagggtctcactgttctgtacagttgtaaattggagctatatcacttggtggctgggtatgtagggcactgtttatcagcatagttttgagtttgtgcctctttctaggatgtatttgagttccgttatgccaagatgccagatgaaccactagaaccagggcctttaccagtctctactgccatgccccctggcttggccaaatcgtcttcagagtcctccagtgaggaaagtagcagtgagagctcctctgaggaagaggaggaggaagatgaggaggacgaggaggaagaagagagtgaaagctcagactcagaggaagaaagggctcatcgcttagcagaactacaggaacaggtattttgtcactcttgaaagtttttattgggtaagaggttcatgccctttgtcctcattttttcttcttgttattttatctttatttactttttccacttcatgttttttttcctttagcttcgggcagtacatgaacaactggctgctctgtcccagggtccaatatccaagcccaagaggaaaagagagaaaaaagagaaaaagaagaaacggaaggcagagaagcatcgaggccgagctggggccgatgaagatgacaaggggcctagggcaccccgcccacctcaacctaagaagtccaagaaagcaagtggcagtgggggtggcagtgctgctttaggcccttccggctttggaccttctggaggaagtggcaccaagtgagttagagtaggaagcagagactagtttggctatttctgtctctctgggggatgccatctctctttgcaaagataattctaaatggccagttaacagatacaataggctttgagcagtggtccccaacctttttggcaccagggaccagtttcgtggaacacagattttaccacagacagggtttgaggggatggtttttgggatgaaactgttccacctcagatcattgggccattggattcccataaggagcatgcagcctggatatgtaccatgcgcacttcacagtagggttcatgcttctatgagaatctaatgcttctgctgatgtgacaggcagtgatgcccacatgccggctgttcacctcctgcgtagcccagtaacaggccacggactggtactggtctgggggttgggacccctggctttgggagtcagggtgtttcacagctactctgacagtgaactcaaagtagccataaactagaaacatgaagatggctgtgttccaaaaagactttatttgcaaagacacgtggcgatcagatttgttctctgggccatatagtttgcctgttgctctaaatcaatgagtctagacttgtttttcatggcgtagtagtttttggttttttggtgtggttttgtgtttttttttgtttgtttttttttttttttttttttttttaaagactccaggctggagtgcagtggcgtgatctcggcttactgcaacctccacttctcgggttcaagcgattctcctgcctcagcctcccaagtagccagaattacaggcatgcgccaccacgcccagctaatttttgtatttttagtgcgcagctagtttatgtagttttagtggagacggggtttcgccatgttgggcaggctggtcttgaactcctgacctcaagtgatctgcccgccttggcctcccaaagtgctgggattacaaatctgagccactgcagctggcccatggtgtagtttggtagtgtttaagggagcagaaagacccatgtcagtatacctaaacaggtataccttgttttattgtgcttcactttacggagttttttttagatactacttttttttttagttgaagatttgtgacaaccctgtgtggagcaagtctttcaacagtttttccaacatgtttgtgtgtcacatttttagtaatattttttcattaaggtatgtacgtacattgtctttttaaagacatgttattgcctacttacagtcaagagcaaaatgctctgtttcactatacagtgtcccagtagcccacctcttacttggccattgaatggaaaaacagaagctccactctgggcaggaaataggatcactgaattataacagtgggaacatactggaagaggttaatgaagcttcttttgctgacaactctttttgcccttaggctccccaaaaaggccacaaagacagccccacctgccctgcctacaggttatgattcagaggaggaggaagagagcaggcccatgagttacgatgagaagcggcagctgagcctggacatcaacaaattacctggggagaagctgggccgagttgtgcatataatccaagccagggagccctctttacgtgattcaaacccagaagagattgagattgattttgaaacactcaagccatccacacttagagagcttgagcgctatgtcctttcctgcctacgtaagaaaccccggaagccctacagtacgtatgaaatgaggttcatctcatggttctgaggacagttgaggaaagatggtggggtctgtttgcattcaggattgtcagctcccaggataatgggatgtgttggttggcagctgacgttcaagaagggaacttgggaaccttaggggcccataataagatgcttggggcaatcttaatgtatcctgataaatttctttcattagccattaagaagcctgtgggaaagacaaaggaggaactggctttggagaaaaagcgggaattagaaaagcggttacaagatgtcagcggacagctcaattctactaaaaagccccccaagaaaggtgagtatatactttcatgccactacagattgactccatcctgccttcttgactgtcttttattgacaaatgaagattcagacttgaacgtctttaactttcgaatttgttctgcagcgaatgagaaaacagagtcatcctctgcacagcaagtagcagtgtcacgccttagcgcttccagctccagctcagattccagctcctcctcttcctcgtcgtcgtcttcagacaccagtgattcagactcaggctaaggggtcaggccagatggggcaggaaggctccgcaggaccggacccctagaccaccctgccccacctgccccttccccctttgctgtgacacttcttcatctcacccccccctgcccccctctaggagagctggctctgcagtgggggagggatgcagggacatttactgaaggagggacatggacaaaacaacattgaattcccagccccattggggagtgatctcttggacacagagcccccattcaaaatggggcagggcaagggtgggagtgtgcaaagccctgatctggagttacctgaggccatagctgccctattcacttctaagggccctgttttgagattgtttgttctaatttattttaagctaggtaaggctggggggagggtggggccgtggtcccctcagcctccatggggagggaagaagggggagctctttttttacgttgatttttttttttctactctgttttccctttttccttccgctccatttggggccctgggggtttcagtcatctccccatttggtcccctggactgtctttgttgattctaacttgtaaataaagaaaatattattcaagttttgagttaccttaatatttgcttttgtagtgtttcaaaaggaacatcataagaattgtcttgataattttgagggaaatattactgcagtgagaaaaggcaatagctaacctataattggattgtcttaatttttaaaccagtaggcttttgctgtgtttttaataaagtaaatatgacttttgtaaattgagtccttagaagtaatctttaggtctacaatttgctcttgtttaaatgaaaaatagtactgtggctcattcatgctttaaccaagaactcaaaattttgaggtaggctttaggtttttccctgtggcactggatgtgtgaattttctcctgagcagacttaaaatatgagaaaagggtgggaggtagccgaacataagtactttatgcattgagtttattgccttttaaaaggaaattggcctgtaatcccagcactttgggaggccgaggcgggcagatcacgaggtcaggagatcgagaccatggtgaaaccctgtctactaaaaaaaaattagctgggcgaggtggcgggtacctgtagtcccagctactcgggaggctgaggcagcagaatggcgtgaactcgggaggcggggttcagtgagccgagatcgcgccactgcactccagcctgggtggtagacactccgtctcaaaaaaaaaagtaattgggcctactacattgttaaacattgttaaattttgctgccatggtcacacacaaatttacagatagtttattagtagaatactaaagagtattccaacgattaaatcacaaaactgtgctttctgcatacccccttgtcttgctaaggggagagaagggttgtataaaaagtttagggggttgggatgtttgcattctggaatttggggctttaatactggaaaagtgagacatttgcttagtatagtgtaccatagtaggaaacctggatagagacatggaaattagaatcaggaatgtagtaaagcaaatggtttattttgctgtaaatgacaccacaaactaagtgtagggcaacaccacaaactaaatgtaggaagcaataaattttactagtgatgctcagccctctttaggaattccggctaaactggggcttgagcaacaattttcaaaagctcgggagatggtaataaaaaattaggtttgtgaaccacctgctactgtttgccaagcacttagagggaaacaaacccttgtttgggctttcttgctaacttgtgtgcaccagtgaaagctcttgagctccctttgagctctggttcccttttgagaataacagatgttgaggattcgtaagtacttaatagagacgcgttgggcaataggtgatgagatacaaattaaagttctgaaaatcggagtaaatagatttaagctaagtgcatgtctatgtcaaggattacatctcatttcagagggaattgaaggatttagttggattagttttgggacaaaatatagaatattttgactgcagccccttctgctcatgtacttttaaggtttgttttctgtagttcggaaaaataaaagtttcaacctgacattggaggcccctgagtacttaattccctgtaaatggaacccagaccgccctaaatgctttaagagagagaagggctggctgacacaggggcttcagacctgccttaaaccaattggactagtctcttaattgactttagtttgaacttatttcaagcctgtctcacttagggattgtaattgtttcaggagtttggttgagttccatcttggttgccaaaggactttattccaaaatagcagtctccagcacaactcaaaggactagtggagtcctgtgggcattatttccccctatgctcctctcagctcttggaatcatgggttctattgctgctgctttttccctctcccctcatgctgccatttactgccttttattgcgtccataggaagccttttgttgggttgtgggggaaggtgagagtcggtcttatttactcagtcacacatttattgagttcccttgattgccttttcagcaaactgttaggcctgtagacctggacgttgccaagccagagggtataaggtgaagataagacaaggtcttatcatggagtttgcttagcacgaatagggtgcaattattaaccatcatggtgtggtaattatactgattgaatccaagatataggcatgacttggtcttcacagaccatccttattgtgcacccatatgtggaccccagttccagcctgcctgtaaccttccccaaagtcctgctcttaggttcactcgggactaccttgattggaaggccctgcttccatgagtgaccagcatgaaggactcccaggacaaggaccagaggtgactggtgttactctggggcttagtgcaagactggaggaagattttcctgagcaattagagagtggctgtaatggagagctgggaaggagatgtgggaatggtagcatggaactaatgtgttgtcaccatgatttcattttttcctgggtcatcaccctaaagatactcacaaaatcccactagctggtctccagcactgaatgagacgacagcttcttgctctcaatttatattctaggatcggggaaaggggcagcattagacaactagtcacacgatttttaacaaaaataagtaattctaacaggacaatgtgcagaggtctagcaagaatttagaaaagagggttctctggtctaagctgagagctattcagatatctcagaacgatgagttccttcctgtttgtaaggggtggatgggtgggagcagggagtagtgaacattgccagcagaagaaacagcaactgagaaggtaactaggtgatgctgaagcagcaaggatgaaggtgagtgctttgagatgctttgaatttacatctcaaagactaatagctaacatttattgagcacttactgtgtcccatgcactgtgctaaataaaaacttaccctgtaaactcatttggtcctcactataatcctgtgaggtacatcttgtctgcatttaacagataaagaaatgaggcacagagagattagtcaatttgcccaacatcaccacattgtcagtgagcactggaggtgggttttgaaaccaggcgatctggcttcagggtccacatttataactactgcactagacttccagtgctgtgggccagtagggagctaggagatagacatgctttaaggaaattgcactagggacaatcatgttagggttggtggggtgttgagagtggatagtttagaaagcaattgcagcagttaatcccagccagtgagaatagtggtgtagaagagaaaggcagcaatgtagatgaagaaatgtagatagatttgagagctatgtaggagttaaaatagatgggacttattctcaaaaggttcttgtctccacacattaaaggaacagcagagcacacgtgcacttgcagacatacagctctcagagtccctagcacagagctttccaatagtggaagcttgatattttgttgactaaaggagtgccacctggctgactggcagatttgaatggagctccctccagcatggcttgccaaaggggcaggggttctgaggctcttgtagactgccactgaaggtatttggcgccacctgttgggcgtgttacccacgattgcctcctgaatctattgtcatttttgtgtcctgcccccgaggttaggtggttcttcccttcttactttcctaaacttcaactcttaaaatgtgagccttcatttttatgacccagagggtcacaaaagaaggagattaggcctttttagtccttatctccctttacctctgaagcatcccatggggcttccctagcattttattttatattgatttatttatttatttttaagaaagaggatttctgtcacccaggctggagtgcagtggtgtgatcatagctcactgtagcttcgaccttctgggctcaagtaatgctcttgcctcagcctcctgagtagctgggattacaggcatgagccaccgcaccctgcatctcctgacttctttgacttgacaccacttgttcctagctctcatacttttcagacagccatttcttagtctgcttctttaaagtctctgcctctgcctcccataatatattgtcccttatgacacctttctttgtcctctttttatttgcacagtatttttaagcaagtttacccattcctctggaggcacctcccacccataaaatctgtgtctctgtttagaccttgtattagtccattctcacatggctatgaggaaatacctgagactaggtgatttataaaggaaagaggtttaattgactcacagttctgcatggctggggaggcctcaggaaacttacaatcatggcggaagacacctcttcacagggtggcaggagaatgagtgccaaagtgaagtggggaagccccttataaaaccataagatctcgtgagaactcactatcacgagaacagcatgggggaaactgcccccatatcaaaccttgagtcaaagttccaagtgcctaatgcaatgcctaatggcaaggtcccataagctcgtgcacacatttttagaaaagattctacctttttccccaaacatgtccctcgcagtgagttctctaagtcagcagtccccagcttttttggcaccaaggactggttttgtggaagacaacttttctatggatggaggcggggagaatggtttccagatcaaactgttctacttcagatcaccaggcattagattctcaaaaggagtttgcaaccttccctcgcatgctcagttcacaatagggtttgcagtcctgtgagaatctaatgccgctgctgatctgacaagaggcagagcttgctcgctgctcacctcctgctgtgcaccccagttcctaccaggccacggactggtagtgttcagtggcccagaggttgggggacccctgctataaggaacaagcacttatatagagtttactatgtaccagacacttatgagcacttttgcaatttagtcttcataataatcctaagaggtaggtactcatcaccattttatacatgaggaaacagacatttagtaacagttctatagctgcctagtttcttccccttattctcccccaactccctgttcagccattgaggtctgttgagccttcctctgtcccttctctcagtgcccctcatcagcctggactctcacacgactctgtcactagtccatgtctttcagctatactgtgttgtttcagggcccatcactcacctctcccttcatgccctgccctatccccaccacaccagtgaagacctcccttcctgggttatcatcagacctgtcacttgcagtgaggcctcacctcaactaaggaggtcaaaataagaataacctctcatgtgagtaagaggaactcatcatccttgccaagctttccaaccaaccccaaacttcaagtatttttgtgtccttgtacagtacgtgaatatttctacataataaaatatttctttcatctctttgccaaatgaggacattgctcattttgtcagacaagctaatgtttgatttgagattgaaggagaaaagggatttattctccagcgataagcatttttgctggtgtttgacaaacaaaaaaagagcagttcttctattagctgccactgtcagacctcatggagtcagttgctattctaattgctgagactatgagaaggtaacactggttaattgatgaatactttcccctcttctgcccctgcagaagatgtgttggaactggcttctctatgaaggcaggttgtagagacaatgacagttcttccaagaaagacagttattaccttgtcttcctgcatggttttgtttctcacccagagttcctgcaaaaaaaaaaaaaaaaaaagagacattttgcagtttcatctaccgattttctcctctctctcaaaaataatgtttttaaagacagagtcttgctctgtagcccaggcttgagtacagtggcacaatcttggctcattgcaacctctgcctcccaggttcaagcagttctcgtgcctcagcctcccaagtagctggagactacaggtgtgcaccaccgcacccagataatttttgtatgtttagtagagatggggtttccccatgttggccagtctggtctcgaacttctgatctcaagtgatccgatccacccgcaactgcctccccaaatgctgggattacaggcatgagccaccatgccccacccaaaaataattgttttaaagcagttctcaaggttttctaagtttacttatactcttttaactcttaagtaaccccaggtaagtggaagctgaaaagttacaaaatgatagttacaagggccaagcagtcctgcatccctgtcagagtgaaacttcattctctctgatgcaaaataaaatgatgcttgttcttccagatccatggttaccatgacatattattctgtattcttgatttaagaaagcactggcactgcccaatctctgtgccctttgattgctatgtcaagcttcaggttgcacaccctgccttctgtaaggaactttccttacttggcccccaattccctgatgtctggtctgtgacctggtgttgaaactggctatgacactgtgcttagacttcctcttaaaattctgcattctgttctggacctgtttccaaccacaataacacaacccactgatttactgttcttaaatccatctctgctattcaggctgattcccagtgatctcatgtccttctatcactgcctttggtcttgcaaatagaccctacagagccccgcaactatttaaccaatcatttggccagggagtaaggcaagagacaaaaattgagggaaggagagaatgatgagcaactgagggagcagcttggggttgaaaagctacctcagaaagcagttctgtgattgggaggaaggtggctgatgttactgcagggggtatcaaaagcatctgtcctgaacttcagagtcaggtagaaaacaaaacagaaagaatcttcttttcctctgagtctggggaaactgagagagaaggagaaagccaaggaaagggaactgacactcactgagccgttgctatctgccaggtgtatattgatgggcacttttcatagtcatcttttttggtccacatgacgttcctaccacacatatgttattatttttattttagagaggaggaaactctaagttaatgtgcataagatcacagagctagtgagacaagataaggctaatttcaaagtttatatctttacataccaaacatttctagttatattctagatataagcaaacaaggaattcagaagtaaaacttagcaaaaacttccagatattgttaactccaccaacctgagctaaagaatgaggctagagatgaacacacacacacatgcatgcacacacatacacacagtcacacacacacctcaatctttttagaactttattttatttatttatttatttatttatttattttgagacacagtcttgctctgtcgcctaggccggagtgcagtggcacgatctcggctcactgcaacctccacctcctgggttcaagcaattctcctgcctcagcctcccaagtagctgggattacaggcacctgccaccatgctggactaatttttgtatttttagtagagacgggttttcgccatgttggccaggctggtctcaaactcctggcctcaagcgatccgcccatctcggcctcccaaagtgctgggattacaggcatgacccaccaggccgagcctagaattttatttttattatttttatttcgatagctttaggagtacaggtggcttttatttacatggatgaattgtatagtggtgaagtccgggcttttagtgtacccattacccaatagtgtatattgtactcagtaaataatttttcatccttcaccccacaccccactccccacttctgtgtctccagtgtccgttatactactctgtatggctttgcatacccatagcttagctcctacttacaagtgagtgttaaattaggtttagcctaaagctgcttccttacatgttttaagttcagcctaaaggtttctccatacatagtaaactgaaacctaacttgatgtgtaatcagactgaaacctactctagtgccaatcactgagttttggccaatcaaaggtgatcaactgttcaaactgtgttcaaataaacaaatgccaagctttaaccaatcctgctgtttctgtacctcatgtctgttttctgtacatcactttactttttctgttcataaatattccaccacttggctgttctggagtctctcagcctactctggctcagaaggctccccaattcacaaattgttctttgctcaattaaactctgttgaatttcattcgtctaaggttttttttctttaacaatgagaacacgtagtacttggttttctgttcctgagttacttcacttaggaaaatggtccagttccatccaagttgctggaaaatatattatttcattcttttttatggatgagtacgatttcatggtatatacacatcacattttcttatccactcatcagtttatgggcacttaggttgattccatacctctgcaattgtgaattctatgtctttttgatgtaatgacttcttttcttttgggtagatacccaggagtgggactgctagatcaaatggtagatctacttttagttctttgagaaatctccatagtgttttccacagaggttgtactaatttacattcccaccagcaatgtataagctatcccttttcactgcatccttgccaacatctattgctttttgactttttaatatcaatgatactggctgggataaggtagtatctcattgtggttttaatttgcatttccaggctgggcgcgatggctcacgcctgtaatcccagcactttgggaggctgaggtgggagttcgagaccagcctgaccaacatggagaaaccccatctctactaaaaatacaaaattagctgggcatggtggcgcatgcctgtaatcccagctactcgggaggctgaggcaggagaaccacttgaacccaggaggcggaggctgcagtgagccaagatcgcaccactgcgctccagcctgggcaacaagagcgaaactctgtctcaaaaaaaaaaaaaaaaaaaattgcatttccctgatgatagtgatgttgaacatttttacatatgtttctggacatttgtatatcttcttttgagaaatgtctgtcaatgtcgtttgctcactttttaatgggattattatttggttttttttttttctctcatttgtttgagctccttctagattctggatattagtcctttgtcagatatttgcaaatattttctctcattctgtggttgtctgtttaactcttgattatttcctctgctgtgcagaagctttttagtttaattaggtaggtcctatttatttatttttgcttctgttggatttgtttttgaggtcctattcataaattctttgcctaggccaatattcataagagtttttccaaggtttcttccagaatttttatgatcacaggtcttagatttaagtcgttaatctatcttgagttaattttcgtatatgttgagaaacagggatctggtttcgttttattatttttatttttatttttttttgagatggagtcttgtttgtcacccaggctagagtgcaatggtacggtctcggctcactgcaacctccacctcctgggttcaagtgattctcctgcctcagcctcccaagtagccaggactacaggtgcacgccaccactcctggcaaaatcttgtattttttagtagagacagggtttcactatgttggccaggctgatctcaaactcccgacctcatgatccacccacctcggcctcccaaaatgctgggattacaggcgtgagccaccacgcccggccctagtttcgttcttctacctgtgtcaatccaattttcccagcactatctattgaatagggtgtcctttcttcagtgtattgttttgtctgcttcgttgaagattagttggttgtaggtatttggttttatttctgggttctctattctgttccattgatctactgtgtacttttataccggtaccatgctgttttggttactctagccttgtagtgtaatttgaagttgggtaatgtgatgcctccagatttattctttttgtttaggattgctttggctatccaggctttttttttattgttgttccataggaattttaggattgctttttctaattctgtgaaaaatgatgctgatattttgataggaattgcattaaacctgtagattgctttgggcagtatggtcatttttcatattgattcttccaatctatgagcatggcatggttttccatttgtttgtgtcatctatgatttctttcatcagtgttttgtagttctcattagggagatctttcacctccttggttaagtatattcctagacatttacaattttttttgtagctattgcaagtgagattgagttcttgatttgattgtctggttggtcgttattggtatagagctgtgttattgatttgtgtatgttgattttgtaacctgagactttactgaattcatttatcaaatctaagagtcttttggaggagtctttagcgttttctaggtataagattatgttattggcaaacagagataatttgacttcctcttttccaatttgggtgtgctttcccttgtctgttttctctggctaggacttccagtactatgatgaataggagtggtgaaggtgggcatctttgtcttgtccagttcttagggggactggacaagttcccctggacagtttttgtttttttgtgtgtgtgagacggagtctcactctgtcacccagactggagtgcagtggtgcgacctcagctcactgcaacccctgcatccgaggttcaagcaattctcctgcctcagcctcccaagtagctgggactacaggcatgcagtcccaccatgcctagctaattttttttttttttttttttttagtagagatgaggtttcactattgttgaccagactggtgtcgaactcctgacctcaggtgaattgcccaccttggcctcccaaactgctggcattataggcgtgagccactgtgcccggccggctttcaactttcatccattcagtatgatattggctgtgtgtttatcatatctgacttttataattttgaggtttgtttcttctatgcctagtttgttgaaattttttattataaagggatactggattttaccaaatgctttttatgcattgattgaaatgatcatatgacttcgttttaaattctgtttatgtggtgaatcacatttattgacttgcatatgttgaaccatccttgcctccctatgatgaaacccacttgatcatggtgatttatcattttgatgtgctgatggatttggtttgttaatattctgttgaagatttttgcatctatgttcatcaggaatattgttctgtagttttcctttttgttgtgttctttcctggctttggcatcaggtaacactggcttcacagaatgagttggggaggattctctctttcttaatcttttggaatagtttcaataggattggtaccagttcttctttgaacatctggtagaattcagctgtgaatctggtcctgggccttttttttttttttaaagattttttattactgattcaatatcagtacttgttactggtttgttcaggatttctatttgttcctgattcaagcttagagggttgtatgcttccaggagttcattcatttcctctaggtttgttcaggatttctatttcttcctgattcaagcttagaggaatgcttccaggaattcattcatttcctctagattttatagtttgtgtgcgtagaggtgtttatagtattcttagatgatcttttgtatttctatagtgtcagttgtaatgtctccattttcttctatgttcttaaatgcagcttctacacaagattcctgcatactgtagaaaattttatttttttcaccaagcccaattaatttagcttagctggagaactattaagaagtgtgaagacacaaataagaaacgaacgacttcattccataaatgtaagtaaaggaaattccagtgatggcttttgctgcacgaagagaaaccaggctaagttgaactattaatattcgctttagactgcgtaatttctaaatggtaactattcatacctaccattcatcctaaccataccttcaggcttggcttagacactgggacctttgtgaaggaagagaggcctgagggaactggattgtaggagatggatggtgagaggaaagctgggggtaggggtaggcgtgcgtctgggcttgcgttgactacataagaaggagatttaaaaactataaagactttttaagattttggaaacttagtaccttcttcatttttacttttttttttttttttttttttgagatggagtctcgctttgtcgcccaggctggagtgcagtggcgggatctcagctcactgcaagctccgcctctcgggttcacgccattctcctgcctcagcctcccgagtagctgagactacaggcgcccgccaccacgcccggctaattttttgtatttttaatagagacggggtttcaccgtgttagccaggatggtctcgatctcctgacctcgtgatccgcccgcctcggcctcccaaagtgctgggattacaggcgtgaaccactgcgcccggcccatttttactattttttattcctcttttctgttttctgattgggattggcaataaaatctcaaatatggggaaaataattttttacataacatttttatgttttataattttatataacattttaatgttttataattttttatataacattttaatgtcttataaaaacaaaattatatgacatttttctaggtgaacttattcttggtgttcctgggatgtctatagacaatgttacagtaacttttgactacagatcatttttttcaaatgatataatattgataaagtaattgtagggctcccaaaataaaatgagttggttttgagcctatggatgagaaatctgctggggaaatggtcaaattttatgtatgtatttaatagccatgtagtggaacaaaaatttaaaggcattacatcatgtttattttattttaattaaaacaaaagaacaacccatttacattatttatttaaattataaaatattacagaacaggctgggagcggtggctcatgcctgtaatcccagcactttaggaggctgaggtgggtggatcacctgaggtcaggagatcgagaccagcctggccaacctggtgaaaccctgcctctactaaaaatacaaaaattagttgggcgtggtcgtgggcgcctgtaatcccagctactcgggagactgaggcaggagaatcacctgaacccaggaggtggagggtgcagtgagctgagatcgcaccattgcactccagcctgggcaacagagcgaaactctgtctcaaaaaaaaaaaaaaagttattcaattggtgacatacatcaacttgtgagttcaggaatctagtgctctctcctttaatttcctgctattttcaagtataataaagcattacacacacacacacacacacacacacacctctttaattgtgaaaatttccaaacctgcagaaaacttgggaaaaataaaataatacttgaaagctgctatggtttgaatgtgtctcccaaagttactaggctcttccttttgctagagctaggacatatatattagtaaatcattagttaaaactgacatttctagttcaaaatatttttctagttcaaatttaatattattgttttaattcaactacgtttacttgcttttcatacattaaaaatctcagttctgaattacatgaacataatcactgatttgctttattttatacataacataaagttgttatatataaaacattggaaacttaatccccaatgcaacaacgttgagaagtgggacctttaaaatacgattaggtcatctcttaaagagatgggcagagccctcataaagggcttaatgccatcatctctagagtggattagttatctcatctcaggagtgaattcctgatgaaaggatgagtttgactcctttcctctccttcatcctttctctcctccttttttcttctgccttttttcttcatcacagcaagaaagcccttgccagatgttggcacctgacattaggcttcccagcctccagaactgtgagaaacaaatttctttcttttctttttttttttttttttttttttttttttttggtaaattacctagtctgtggtattctgttatggcaacacaaaatggactaagacaaatacccatcatatagattcaacaactgtcaagattttgctgtgtttgtttgaactgtgtgtgtattctgaattcattccgaagtaaattagagatctagcatttcatccctaaatactttagcataaagatgacttgatacataaccgtggtactgtaatcatactaaacaaaactgaaaacagctctctaatatcatcgattaccagttcatattcaaatttccccatttgtctgaaaagtgcttttatatctgtttttcctcaaagatattgccaagaatcattcactaaatttgattgtaatgtctcttaattcccactattccacccattttttaaacagcatctttttagagagacaaggccagtagaatctctcacattttgaatttgtgtgattggttctttgtggtttcatttgacttattcctctatccaatgtattttttttatagactagaactttttgaaacaaaggcttgactagatttagatgaaagatttttgacaataattcttcataggtattgctgtgtactttgcatttcatcttattaggaagcatatgcttaatgtcttgtcctattattggtgaggctaaacttgatcactcagtcgaggtgatgacagccatcacctctgtaaaggtatttctcccatttgacaatagcaaataatctatgaccatgatactttggcatgatgtgactctcttgttcctcactgtctattctcctaatggttttaacatatatgatgccttccctgaatcaatgatcacattaggcttacaaaatgctggttttctaattctgttatttttcccaacatttattcactggtactctgaagggtagaccttttttcatcagtggaacatttccttgtgaaatgtcaggatatatacttgttttctttaagcaccaatttcctgtgttatgaattggaagatcacatccagtggtaatatcaatgggttgttgttgctttctttttaaaatctgtattcgactattaataggaacccatggatttttatatactcaatgtgtttaattatattatagtcatctttttgatgtctgagttgttccagttttggccaatggaagctccttcaaactggctgacctgtttttttgacatgactctattagtctttgaacagtgccttgttttatgaaaacaatgagatactcacacttgctttgtattttccataactcaggcctggaactggtcacttctccaagaagctctatttcctttgagtgggaaatgatatttacacactacaatctgtgcattgaggatgctcattgctacagggctactattaggctctttcatttgctagagcagggacatatatgttagtgaatcattagttaaaattgacagttctagttcaaatattttttctaatattattattttaattcagctacttttacttgctttttatacatgaaaatcttagttctttttttttttttttttttctttgagatggagtctctccctgttgcccaggctggagtgcaatggtgcaatctccgctgacctcaacctctgcctcccaggttcaaacaattctcctgcctcagccgcccgagtacctgggataacaggcgcccgccaccacacccagctgattttttgtgtgttttcagtagagacggggtttcactgtgttggccaggctggtcttgaatgcctgaccttgtgatccgcccgccttggcctcccaaaatgttgggattacagggatgagccactgcccccggcctaaaaatcttagttcttaattatattaacataatcactgatttgctttattttatatatagtatagtttcaaataaggatacaaatattacttaaccataaaacaactgaatgatgttcaaagttctgatagttctttttgtccttagaatatattctattaagtcagctggggcaacataatgagaccccatttctatttaaaacatgtattttaattaactgggtatggtggcatgttcctgaagtcccagctactgtacttgggagaccgaggtgggaggatcacgtgagcccaggaatttgagggtgcactgagctataatcacaccagcgcactccagcactccagccttggctggcaacagagcaagaccctgtctaaaaaaacaacaaacaacaaacaacaacaacaacaaaaaatagagagagaagagagagagtaagtgtattccaccaagaacatacagtagtatcttttaatatcacttgggatacttattttttctgtgtggttcagttctatttgttttaaattttagaggtttttgtcaattttttattaacattgtaaattatttatacgtttcaaaggtcaatattcacttctcacttctattctcccttccttcctaaaagtagccatttttattaatttcttgtttatccttccaatgcagcttttttccccctttggagacatggtctcactctgttgcccaagctggagtgcagtggcaccatcataactcactatagcctcgaactcctaggctcaaatgatcctcttgcttcagcgtcctgagtagttaggactacagggggtaccaccatgcctggctaatttttttattttatgtagagacagagtcttgctatgttggccaggctggtgttaaattcctgacctcaagtgatcctcccacttcatcctcccaaagtgtggggattataggcacaagccaccacatctgacccaatccacctttttgaaaaaatatgtatctttcctctttcttaccccaaaggcagtacatagtttaatcattgtattgcactgtgaattttccactctaacctagagattcctccgtattagttcaaagagatctttctcattccttttcgttagactttttcctttaattgatacatgatattttacatattttatttatgaggtacatgtgagtatctgttacatgcatacaatgagactaatgatcaagtcaggtatttggggtatccttcaccttgagcatttatcatttctatgtgttggcaacatctcaagtcctctcttctagctactttgaaatatactatatatatatatatatatatatatatatatatatatatatatatatatattgttgctgactacagtcaccccagtctgctatcaaacattggaacttattttttctatctcctcattctttttaacagctttgcattactccattgtgcagatgtactataattttttcaactattgtactcttactaggcatgtttccaataattttcaattgttacaaataatgacatatcatttttaaaaggcagattactatataataaagatacatacttcactttgggaggccaaggcggacggatcacaaggtcaggagttcgagaccagcctggccaatatggtgaaaccctatctctactaaaaatacaaaaattagctgggtgcggtggtgaatgcctgtagtcccagctgctcggtaggctgaggcaggagaatcacttgaacccagcaggcggaggttgcagtgagctgagatggcaccactgcactccagcctgggcaacagagcaagactctgtctcaaaaaaaacaaaaaacaaaaagatacatatttaagtttggcatttccttacatgtattaaaatatgttttaacagaaaaatattacttctattgatttgtttttggttaggttattaacactctcctaaacacttcggtttcatgcaacaatttaggaaatatctggtgtgcttcttagtgaatgtggagatactggatttgacaaatatcagttggttagactagtgtttggcacattggaagtgctcaataataatagtcaatactattatgaaagataatagtattaacaaaacaatacttgttaatatcagaaaaacaaattttaatttatttttctttatgcggacatgtcatcagggaatttgagagcagggtgactacattttgttttagtcagctggggctttaaacatttattgagtaaccaccatgtttcaggcattacagtaagaacttgtacctgaagcagatccatatactgaaggcccgaggaaaggaataaagggcaactgggaacctgaccaggtctcaagagcggtgttgggactctagggaggaggcagcagaacgtttccagtggacggaagtgccggggagtccaccttgggagaccttaggcttactcagatttggaggctccaggtggggtggatgcaaaccacaagatggagccaaattacaagtcataggtagcaacctcctaaaccacaaggaggagaggagaggaagtgaagtcgctcctctgcgtgcacgatcacttgtctggaagcttttctgaagtcagagagaaaggaaagcctgagaagtgggacatcattcattgaaaggcatctgtgtgtagagataaatagggtaacatgatagggagagattggagataggtggtttatttagcaaagttggtcaatgaagcttctctgaattggtgccacacgagttgtgaatgggtgatgaattggaggcattaatgttaaggagaattctggggaagatagtgtggctattgcttaatgaaagaaggaagagtagagggaagtaaagatgaagacacatgcagcgccagatcatatagagtcttgttgaccaggagggaatttagactaagcaagaaagaaagtctgaactgggggagtgcttcgactgaatccaggagggagaagaaaatctcttcagtaattccatccccagtcattcttcaagctcacctcattccctgcagcctgttgctgctgaagcctcagaagaagtttgttcccaaagttgggaatacctcctcctacacatttcctagtaatgctgatgtctgaccctgttcatcctgcctcatgtctcacaagctggtctccattcgctgctgagtaggacagtgcagtggaaagaacatgggctctagcatcacacagaccttccaaccacctcctagctgtttgaccttgggcaagttaggtaatttgaatcctagcttccttctttataaaatgaaatcattatacttaacttgcagattggtcataaggaagaaatgaaataattcatgtatggcagaatgatgcttttctttttcctttgtttgtatttaggtttgtcacacaagacaatagcacatgtcaccgccaaggcctttcctcttctggctttggatttcccaaaatctgaagctcacttgacattatgccaggtgtcccagacattgtgccagagagagagaggggaatgcctttgacaggcaaagggggaaggttctcccaaactgaggaaggcacagtggcctgtgggtctgaaagagccctgcttccttgcagcagccaaggcaggtggggaggcctcccagggacggggaagttggccgtatggtgcatctttgcagtcctgctcccaggcactggggatcactcctcactaaagattcccctgccccaagcctagtgcagaagcagcagagcttccacttggaaaagagcatacaggttaagccctaggcatgcttggagtaaacagtctggactggagaagacaacaggggcttctccaaggcctcagcactgtgtcagggcgcagacccttggaacaactgtaagagaccagaagccccaataaagacagattgaacttaaaaccagcctcatggcaggggttttgaatcagatttaagattttttaaagagcaggttttgaatcagattttcgattatttaaagacatttactattttttgcactctgtgcactatcttattaatcttttggaccaagattcaaatccactacacgtgaaaagcattaaggccaggcacattgcatgtgttgggtaaacggtagccaatgttattaaaaccagctgcagacagtcggaccaggctggatttgaagcaaacaaaattgaattaaatagaattctacagtgtttcaatgcccattatgttctgggtgttggaactataagacacagccttctcttgctttagaggagcagttagtggcaaaggcaaattcatacacagtcaactgacacagggcggaatgtggtatgcactgcagggacagggtggccagcatattgggggctgggattgaaaatgcttcacagaagaggtgacatttaatctggaccctggaaggacaggtagaattttgactggttggtggaggaaggcaggtccagcacagagaatagtttgtgcaaaggcagggaggagtaaacatgcgacaacagttttctgtgacttaagcattgatcattttcaggaggagctattatatggttaaaataggccaggtgcggtggctcatgcctgtaatcccagcactttgggaggccaaggcaggcggagcacctgaggtcagaagttcgagaccagcctggccaacatggtgaaacccggtctctactaaaaataataaaattagccgggcatggtggggggtgcctgtaattccagctactcaggagggtgaggcaggagaattgcttgaacctgggagacagaggttgcagtgagctgagattgcaccactgcactccagcttgggtaacagagtgagactctacctcaaaaaaaaaaaaaagaaaagaaaaaaagaaaaagaaataccctgaggacggtttgagaagggtcttcatcttgtaggtaatggagcacctataagaatttaaaggaggaagggaaaaagcagatatcctataagcttctgagagaaaaaaacaacaacgattacgtacaaagtttcatgacacaatatcttttggattatcaacaataacgcaggaagctaagggattatagagaaatgccttaaaaattctgatggaaatgatttccaatcttgaattttataaccgtggaagctattattcaagtgtgagagtagaataaatatattttccgacatacgaagcataaaaagttttcctcatatgcactgtttctcaggaagtggaaagaagaggtgcctcattaaaataaggcagaccacaaaagggcaatgactggatacaagaagcagaagatccaactcggaggataggtaaatcctgacgaggatggcgaagagtgatctcagagtgaccgctgtatcatcaagggcaaggagttaagaatggagcagacagaaggttctgggagagttatatctggtgataaaattgacagaatacctgatgtgtttgattgtactgtgaggaattttgtgattcattaataataagtacaaatacagccacacaaaggaaaacaggacaactatatactccagagaaaacgaagtcgtctagaaaaggaagagtgagcatggcttgctctatggtttgccattacatggtcatattgatagaaacatagtaaacacagtaacttttactatattgtaaaaattacaatatagtcacattaaaagaaagggcatgggaaagggggcatgatgttctttgaggatgaaaaaaatctaaatccccctcttccacagcaggaggtaaagagataaagcctaaagctgaaaaatctagatgtagcaacacaaacatgttatttagagatgggaggttaataccaacaaaacatattagaacaattgaaagttattttctgtaagggtgaggatatggtgggagatggggctggaaactggtatttctgtagcaaatattgtagaaatatttgactctttaaactataacataatttggttaaaaattaaaaccgaaagagagtggatgggaagaggggatctggaggcagtccacgtagacactctcagagagcgtgaccaggagcttgggtggaagggagactgggtcaaggacagacagaggatttgatgttcttgttatataggagagatgacatgcttatgatttgtagggtgaccctgcaaaaagggagagtttggatacaaaggacaggagactactggatgtctgttctaaaagagagtgaaagatcaagaatgcaggaggacaacttgttttttaaaataaaagactacgtaccttgagactagaaacaaatgtgagtatacacgcaggtgcataaatctaaaagctctggaattactcctagaagttccagtgacttcagggtagtatatgcaacagtaaaaaaaaagcatatttctttagtcaaaagaacacaattttaatgactttatcaagccttaggacagagatgagagaaacacctttccaatgatgcatcaagttaacgtctaagcaaaagatcagcagagatcagagattgttgggtacacacgtatcttgtgatgtcttctgagaaccaacttattcctctttctctgagaagaacttgacccctcgccccggggctgagtgcttggcagccacatttgtgttgagatcttgattcctgctctaactacacagggctgggatggacacctgctccaagtttggccagtcatttatttttccagtaatttaaagctgtgactaggagacacagcctctgtgggttgtgagggttgagatgatataaactcaggagctgtcgggtggacatgttcactgagaaggacagtcagtccacagagagagaacaccgctaacatgcaggggggtctagagaacacagaccatgtggatccgagagtgttggaggggcagctctagcttctctgggcttttcggatccgagttctgttcctgggaggcctggctaaaatctacccttgggccctgcactcctccccatggctatattgcaaatatcctatactttgcatgtgatcacacaaagagggtttctgttactggcacacaaaaagtttgcctgagatgattctcctccacttccatcagggtcttctggtcattgatttcaacttattctctcttaagaagcccattgagtccccataatctcttggtttctttcttttccaggaccaactgctcacagttcaaaccctcattttgcctctatttacttgtaccttgattggctgatgccctaacagacccaggttcttcagaaagccttcctagtccacctcagaccttggggatccccctttcccatgacccccgatggcacctgattacgtcactgggttccagttaccagaccacagccaaggtccaggatggctgcatcagagtcatccagagccggttaaaaatgacagcctcggctgggcacagtggctaatgcctgtaattccagtactttgggagggaaggtgggtggatcacgaggtcaagagatggaggccatcctggccaacatgatgaaaccccgtctctacttaaaatacaaaaattagctgagtgtagtggcgcacacctgtagtcccagctactcaggaggctgaggcaggagaatggcttgaactcaggaggtggaggttgcagtgagctgagatcatgccatggcactccagcctggtgacagagtgagaccccttctcagaaaagacagcccccctgttgctgccccctgcactcccgagattctaattcagtaggtctgggtgatgactgttatttttatattttatttatttatttatttagagacagggtctcactctgtcacctaggctggagtgcagtggcgcaatcttggctcactgcagccttgaactcctgggctcaagcactcctccggcctcagcctccccagtggctgggaatacaggtgcgagccaccatgcctggttaatttttaaatctttctttgtagagatggggtctctctatgtagcccaagatggtttccacctcttggcctcaagcagtcctgtccccttggcctcccaaagtgctgggattacaggaatgagccactgcaccaggccaatgcctgtacttttaaaaggatcccaagcagttcttatgtgcattctggtttgaaaaccgtaatctgtattgctcattttggtcttgacataaactatgtggtatggtgatttatctctttgtatgttttaaattctgttcacagaaaagtagaccaaaatcttctaggccacatatttagagtgtgtctaggtggacctcccctcttacgagataccttgcagaccgactctaccacctcctacctaacatgactgactccactgagggaagtggccaccttatccaagccttgggcctctctttatcatgcatgggactctagggaaagtagaaaaaggagataacatcatggcaggataccagtggcctcttcatacagagtaaacccaggcaggagtggagtccccatgagcctgtcttgtcccagcacccttcagaactgttgttagctgagggggtcgtgaggaacaggataatctgcatccctttcagggtaaacctgaactcaggaggcaaatttcatgaagtccatgtgaaatggctcattcacaaagtaacacacaatgggccaaatggagcaagacacacctgtgtgggccccaggacggctgccaatccccagcaccacatgcctcacccctggaagaactggccaaggcctggaaaggacacagtgcaaacaccaccaaagcatttagtgctgccagccagagctttgggtagagcaagaatgtgtgtttgtgttgaatgggaagggaagctagtaggtgtccaacaaaccctgccatgaatactggggccaaaaaagaggggacccgtaggacagatgttgatcccactcaaagtcagcacagcgggatgcacttaaagggcactgagcacgcaggggctgtcacaaacccatgaggatctgcagggtgtctcccacaagtcatttctctcagaaggatcattacctaaaatagcagaaaacatacgatcgaggttgctcaatttcaatatgctgggatcctatctctgagtgcccacctcccccaaaacctcactctctcaccccacctctgcttcttttctccctgcccatttcttttctgacttctttccccacaacagaatctctgattctccacccacgtcctgttcagagtcatccactttcctcccccaccccccagactcccggggcctctgcacctggggacactggacacatatgtgcccatgatgatgaggacggtgcccacgaggaagcccaccaggccgatggccagacccagggcacagaccagggtctccatggcatctggtggtggaataggcacctggagctctaggagagaaaggaaggagtcggtggtatatgaaaggattctagagtaaaggaaacctggggccaggagggtgcatggggagggggctccgtaccccaatgcctgaggagtggcgcatccaggccccagtgctccacctggcagtcatagacgtcctcggctgagggcacgaagggcaggtagtggaacttgcggaacaaatggtcaggctgggaatagaagctggtctgggccactccctcagtgacagtttggccgttgcgtagccaggtgatattgatcacaggggggaagatgttgtccacgatgcagatgaggatgttgggctggcccagctccacccgagacttggggagcacggtcacccgtggaggcactaggaggaacgggccctgagtccacaggctcatccctcaccccagggccttactaggactgggattaagggacgttccccctttgtagccatctgtgggcaggggatgctctggggtatccactggggcaggagaggagggaaacagagggagaggagactggggagggagtggggacgccaggagctcctatatttgactggtccctgggcgggagtccgggtgagaggtgtcattcctcaaggagaggggtgccaaaggggtctgggaagacctggagcctcctgggaaagaaaggaacagggcatgacaggcgcgggcgctgagagcgcgccccagagtgatgggaacctaggaactgggaggaagtttctctggaccttcccgcctgactgggtgggcagagggagggccggtaccgttgatggctctgctgcggttggagcgctccaccaggatgtccagatgggctttgattgcggcgatgccggccagcccaccctgcgggtcaaagcgggcaaagtcaccaaactcaggcagacgccacacggcctcgcttttcttcaggtccacagagaacagctgttcctcatcaaattcatgggtgaactggcccgaggcgccgtaagactggtagaaggcgggtccgtaggagcccatgtggtcagctgtgtttggcgagttcagggtcaaggagagagaaaaaaatgtgtctgtctcatccacaatatgtgattgttgagtccctgagcctgggccccgtcctgggttctgtgtggggacagagtcctgttctgacactgggctggccctgggagagagaaagggagagagaacaggaagaaagaggctcatcccagcacactgcagtcggcacagagacagtgcagtctggcatatcaggatgggaagaggagggactgcctaaaatcatgcttggggttccagaatttaaatcttggctgtggtcatctgccctggctgtgttgtcaggccctgtgttgtgagctggtgggactgtgggggtgggatgaggaggaatgattaaggacaggagagtatggagctttgcacagagatgcagtgcaggtgggtgtgaggggaaacaggccacggctggcaggggtaagaattaaggttagtgacccagagaccaaggggatagggagaggcaactcaaggcattacaaagagcactggacgaggagtcagaagtcaaggttcatgtcccaattcctccatctcagagcattatgactgagtgtggctcttccataactgttgtctagttttctggaagttagggattaagttttaattcttgtagaactctatgaagttgtttgagcaacagttattgaggaactagcatgcacccagcacaatggggggccagggaaataaaagaaaaaaaagatgaaccatctgtagacccgcaccccagctcatgtctcccgaagaacaaagacaggtaaatagttaactaccggcatgggcataaatactgcaacagaactggacttgatcgggcacattccaggccaggggtggtagagaaatcagggtgcttgctggcatctgttgggtggaggtttgggtctcaggaaggaggaaggaatgaggagaaatctgaacgtcagcaaaggctgactggggcacctgcgcagctgaccgagctgcatcttcatttaggtccagagtggatgtgacagagatgagggggattgggtgtctcttggtgaaggaagttgcccataaaccagagagcgagaggaacaagcatcctccatgccacctcctcatgtaacccaactccgtaaatctctgctccccgccgcaccctcctcgccctcgcactcacccttggtggcccctgcctcctgcgggctcaggagggtcatcagggtgtggaaccccaggaccagccctgctctgagggccattacactctggtgctttaatcaaatcagtctcagtccgtgtggtgaggacaggaacaaggcggaggtaaagaagaagaaaacagattcgaggatgggggcgaccccttctgtcttcagccaatcacagaaattctctgagtgaatgtatctgttgctgggtaaagagggaaagagccggggtgagaaggtggaaggattcactgggcccccaggagaggccaaaggaagttttggaggatgggaggggcttggaccaactattaccacgtcctccaagaagggaccccctgaagagagagaaaaggccgtcagagcaccgcgcagctgagctccaacaaatcctctctctatgtccatctgcgatgcagggaatcctactttcccaagaagtttccgtggacaaattttgagttagaaagtaaaataaactttaccaataatctttaaaaggaaaacattggctacacaatggaataaaaacctcttaaaactttaaatcactttcaaaaatgttattttatttttcttttattattatttaatttcattgtgtaagaaaaaatgtgtaattgttggagttgtttggtctaaagcaaagtgtaaagagctcccgtggactccccgaggagggcagaggtgctggtcctctctgttggtccctccaggacccgggcacctcctccaggctgacacaggctggaggacggcatcacccttgcctttggcttctggttgggctcggctaataagaggcactgggagaatttagtccagtatatatatttaaaaaacaaaacaaaacaaaacaacaacaacgtaaagctaacgtctgtgtaaagagaaatctaaccaaattaggccatgtgtcaaagaccatgaaatcgatgattttcaacttggagggagctaggaaatcatgcgggtctctggttccaaatgagaatcacctggggggttcgttataatacgtgttcctgagtttcctctttacttaatgggttagattagcctttccaaggcagggccagggaacctgtgttttcagcatgctccccaggtggttctcgggtagtctgtggactggtaaaacctgctccaatgctctttcctcaatgaataagggatgcctattttaagtggggcagacacagcttctgacttcaaattaatcaaatgacagctagtaattgatttgcatggcccggtttatggggagccctaatcttagttttttcgtttctagtccacagtgtctacgtaatgcctagcacatcataggcgcctaggagacacctgcgcatgaatgaacagtgtcttcactgctttggtcctgccctggttaggacccttgccaccttcacctccccccaagtgaggtgggagctggagccatgagatgaaagacgggaaagccatgaaaaactcatgataaagaatgttgcttctttggttaataacagtcgagtatcgggtgtttttttttatttgaaaacatacatagattttttaaagtatgttttttgttattaacttataatttaattacatgataatcctctatggcttggagtgtggtgaacttctgtaaatatttcacatgggctctaataaatgtgatgcagaattttatacatgtacatgtttattggatcaagcatgtggattttgtcattctaatttattacggttttctttatctttggactggcctatacataactaagagtggtgcatttatttatttattttttagagacagggccttgctctgttgctcaggctggagggcagtgaagtaatcatggctcgctgcagcctcaaacagctgggcttaagcgatcctcctgcctcagcctcccagagtagctgggactataggcatgccccacaattcctggcctatgaatggtatatttaaatctctaactgtgactgtaggtttttcaacttgtttctaatttttaaatcaacttttgccctctctgcatttaggttattaaggtgtttactcttgggaattattacagtcttggtgaactgagccttttcccaatttgtcctgagaatctttctgtcctactctgtcttgtctgatagtaataagttctacagctgtctttgggtatttgttcactgtatctttttctactcttttgtttttactcttcctttgtacttatgctttagatgtagcccttgaaatgtcataaatatagatttttgcttctgattcaatctgacgatctctgtcttctaacctatgttcaattcatatggtagtcaaagtgagcaaacttgtttctgcaagagacaaacactgaagcctcagtggtttaacaaaacacaggtttattttttagccacgtgtagttcaaggcaggttgggcactctgtagctcttttccaaaacatgcctcaaggtggctaagctccactttgcatctctattattgaaaagcacttcatgaactcctagctttgcaggtaggagagagaacctgggaaaggcacattgtttccatggttttggaccagaaactatttgccatctctgctcacattccattggcaagaagtaaacaatgaccccacataggcgcacggggatggaaaaatgtacgttacctatgtgtgcaggaagatataatggtttggtgagcacatggccctgtctttgctgcattctgattgtgtttattgtgaatattgatgcacttgggcttgtttgtaataccttatttatttcaatatttctattttttaaagtttttttgtttgtttgtttgtttgtttttgagacggagtctcgctctgttgccaggctggagtgtagtggcatgatctgggctggctcactgcaacctctgcttcccgggttcaagcgattctcctcagcttcccgagtggctgggactccaggtgcatgccaccatgcttggctatttttttttttttttttttgtattttagtagagacggggtttcaccgtgttgcccaggcttatcctcctgagctcaggcaatctgcctggctcggcctcacaaactgctaggattacaggcgtgagccatcacacccggccaagttttcttttttaatcttcattgccttttttttttttaagtgttaccgataccttctccatcttccctctgactggataagaactttagcatgctttcaaatttattcacatattttctccttcaccaaattatttggtcaacattacttttcatatcttttggcaccttctagaatgcgttctctgattagaattcttcttccaaaacctttcagatgtgggaatttgcatagcaaaccttctaaagtcttgtatgcttgataattttttaaaattataccagcacttttgaataaagtttagctgtgtattacatactatttgaagtattttcccctttaatattctaaataacatcattccaaatttttttttttgcatccaatgtcacagttagaaaatcccatgtcagtctttcatgctggaatcttctagaattttctcattgtctttgatatttttaaattttgctagtgtgtctagagtgggtttttccttctctctgtaagacattatggatcttctctatcttttaattctgggaattcatctttttatttctttaactatttttctcctctattttttgtctttgtgaaactcatataatctatatttggataattctctcctccttttcccctgacttttctattgatgacttctcaattcttccctcttttgttctgaactagctcctcagtgtagtcctccatctttctgttttgtttttcagttgcatctctcccactatttatcccattaatgtggcttttactttgactattatatatattttttacacctagaacttctaggtgttttccctatattctctattttttcatattataatagcttctgacttttaaagtgcacttttaatgctcattttaagcggctggtctatattttctaccacttctttcaaggacatagatggtcctgtttgctgtttttcttttgaggtgtcggcactccctaaaggtattattttgacccactagtggccatctgtgttggtgtcatgtgtgtaaagagaaaggagggccagctggagtcctaggccagcgcaaaaccatagtcactaccctttgggtgtcacttcaggtcaggacttcagggtgggagcactaggaggcgtagggagcactgatagctggggtggcagaggaggcaatgactagggcagtccccagctcctcccactccagcaggatttcagcttggattttctcacccacccctcaacagctggacaggcaatcaggatcttgccatcgttttttgcagcagggagcaggcagtgattgctcaaggccaacaccggggaggcaagagcagaaggttccaggaaccttctcatagccacagccagcaagcaacccagttcagaacacctttcagtctcaccagggcttcctcattatttgttttcttggaatgtatatgtatggtccacattccctcctagatggaaagggcctgtaagaagggatcatggatgattgaatctttgttacacaatcttccttttccccctaaacgctagcacgttattaaataaataagtcaatgataacaaataaaagtgaataaagtggataaccctgactctagggagaggtactgttattgggactagagtctaataatgaggcaaacacagattcgacaaaaacttactaaagtgtcctttaaaaatgacacaaatccagttgttctaaattgtctaaaatgctgactttgaggtaaagttgtatctgtcatgttctttggagcatgacaagttcaggtaggtgttgggggatattcttcattaaatacatgtttataggacacctgatgtgacttaggcactgtgtgctgctctgggagcacagaagagcaggacatgatccccttcctcaaggactgtgctgtcctgtgcagtagccacaagccacctgtagctattaagccaaaaaaaactctaagtataaaatgccctgggatttgaagacttaattaaatgtatatacataatctcagtaatttctatattaattaatgttcagtttgcaattttttgtatatttgcggtttaaaatatgtattagattaatctcacctgtttcttattcctttttaaatgtagctactagaaaatttgaaattgaattaagaggctcccattatatttctactggacagcgctgctctgggtgctcttggttggctaccagttggccactggctccttttctgagatttttacatttaagtagccagcttgccagagtcttcaagtcctttcctgttactacctagatattccaccagagggcgaccttaccattgaatttttccattctggaccttagatctgactgtttgctggtgcatcgctctgttttaatctattttgctttaagtgccgtgctaggctttgggaccacaattatggttcctgccaacaagaatggctgtcttggaagtctgtacacagaactaaatacgtggtggaaaaaggagaaggtctattaatgtgcaatataaatgttcatgtggcctgcaactttctggggcaatcctttccctagtaattaagcagtttcaagtgcctgtctaattgcaggaattcaaatggctcactgctgtcaccagaatgtctgataattcctggacagagaagtgatgcaaatgtgtgcttacgtatggagttgatggcatctcctgcaccagcctcctgccctgggcagactgttgtggtcatttgggggcagctccccagcacagcagatttcttgctggccatcacttttcaaactctggacttctgccctttggctgggaactgctcacttcccttagaactttcccctcccgtctcctgacttctctaaatgccagagttccaacctctgtctcctgggaaattctaagctaaaatcactcttcctttatatctgcagatagtttgaaatttatacatcaaaaaaagtaactttaaaaatatataactggtctcattacactctggagcaacaattccaaatgatggtaggaaaaccccaaaattggccatcgaaaggcatagatacagcccttcctgtttaaaagaggtatttttgaaaaacttcaaatgtcttctgggaaaggcacaatctttcacggtttcttctcttccccctctccctcccccttttgggaatgacatcctggggcagaggatgaacttacagagcgtgctggctgtgggaagctgggtctaggtggcattttttctcttttctgatggttctctgcccccagttccttggcctgtccccatcgctcgccaacatttccgtggctggtctaatctgcgatcgattatccctgacgaaggcagtggggctcagccaccttgcctgctggtggccccagcgtggctctgctactactcacatccttccagtttggcgaggctgcagcctgatcctgggcccgtgtgttctgggctgtggcccctggctccaggccagttcaagcctctccatgaccatcctgaacaccaatttactgcacgtcaactcactaaaatcaacccatcaactaatcagaaattaatacatcaaatcatcaattccccaattttatcaatttgccaaaaacttgactttaaagttttgtccttttatattgaatttaatggtttttacaacttttgaagacttctgaaaatgttggttaatttgcctttccttttgttttcatagtagcttataagtaatattcgatttgtcagatgttggtgatacagggagaagatgacaatggtgacagagtgtttttcatcttcccaagtgtcctcacaaaaacagagagtgcaattgggatagcaaaggaaaatatccacaggcagtgtctctttatcagaccagggatatccctagaagatcccgtgagactctagaatgtgtgtgggtagatccaagctgtagatccaaggtagatcctgtgggctctagtgccatgtggaggtagcagagggttgagaggagagggttctggtgtttctaagatctcaggaacacagaagtggccagtgagtgcccacctcccaaaagaggtgatctcagtctagaatgaatccccagcagagagctctaaggacctagacttttgtaaatttagaaactcccttttctcttaccaatgtctaatttttaagactatgactttgatatagctgtcaatattctgttttggaatattgtttgcttttggtcttctgtgataaaaatccaaattttcccctgggtgaataggcataaggtcacatctaaagaagtgcaaaaggaaaacattaagacctctagtaaattaatgtttttataataacatatatctccatatgcttcacagaaacatgtaacttctgtctatacaagctttgggtatttcatttataatgaaatggcgcattaacgtgtttttctaaatcaaaagtcaatttcctccttgagattaattacatctccagaatatgaaagcagcttctgacactatgtatttgaaatagcaatttcccatgtttgctataacaacaataaataaattgttgcgtaatacacaaaagggaattcttaattctgccctaggtaggagaagctagagagaagatgacatttgaactgtgccttggaggataaatacaagtctactgatgcggagaagaggatgagagccttgcaaggagagaagatggcctgggcaaaggcacagaggcctcaaagtatatggtgggcaggggactgctgcatggccaagtaaacgaggagccggaggagacgaggcttaggaaacaggctggtgtcaaattgtgaaagccgcagatgtcctgctaagtaatagggttgtgccttatctatgattaatggcaagcaggcacagtttttgccttggagcccggtgaaagcaggattgacttgaattgatagaaagagaaaagaggcagcaaaccatttaattgattgactgatcaattaattaattacccgagtctccttgtgaaagttccaaaccttctcactctcctctcactccacattcagttctacatagcagcaggaattccttggctcttacttcatcaagaaaattggtcaggcacacccttcatcagcgacattctgaccatttggagaccctggtttctctttcttcttcttcctgaagtctcagaggctggggctcttcctgctccaggctaaccctgacctccagttatgcgctcgagaccttcactcctgcctccactgggagcttgtctcagctgtcctcccttctatctctctgttaactctaatcagccccctgctgccagatccttcccttcagtttagaatttaggctcaaatcttccttgtccctaatgctcttctcatctccctagcttccaccctcatctttcttctttactcttcccatgttccttaaagaaaatgttacacttctgtgtttcctctttctcccctcccactcattctcagccccactgcagtctgacttccttgtccatgacctcagtgggacagaaattgattgccaaggtcaccaaatctttatctttgtggagttttctgctgctttcatcacagtagatcattccactttcttgaaatctctccttattcagatttcaagacatcacactcctctgattttcctgacaccattcagatcattcattctggggcttctgctcctctgggaatctctaaatgcagagtgcctctagggatctgtccccagctaacaatgtctccttgatcaaacattcatttgtatagcttcaattcttagtcatctaattatacctaacatagcaaagaacaatccttggcatctactaggtgcttagtagctgtcacatcttttcttcttctcagaccttttgaatacagcaacctggtcttctattaatggagagcaaaatctaaccattccacctcctctctcctcagggccacaattttattcttctagatatctcttctttctctacattaatccacttctttttccatttctgtacactcactttccttctttggctctcttcatctgatcaaaatgaaaaattaaaagatatttcaatgtttttgtgtaatagctaatctattataaaatatttatattcttagacatgcagctttattatgcaatcacaaatgttttacacgtttgacttttctcaaaaccaaaaatcagtttttaaaattgctttttacctatatgtggttcttgcttgatgaaaacaagcaactagaaaaaactggtctacttccactcaaacagtgtctccaactatgtggcttgcccggctaccagacccttcttgagaaatattctgccagacacaaatgaacactcttagttcacactgcccattggcacacgagggcatgcagagtgttctctatggagaagtaggtgcttacagcagaaatagccttccatgaggttgcgtcggttctgctttcactttcccgtctcatgcaaagtggcccagaaaacagcagcccctccctggaactatttccttcctttctcagagagttgcatctcctgctctctggaaagtttcatgaggaaatggattgcctctgttcttggtgaaaattaactccattactaagttcttaatcttttttgtttatatagctctcattccaaaagacaatctccctgactgggctagaaagtcatatgtttgtaaataatcagagagaggccaaggaaaaggacagagctggccactgagcccagagggctctgttatcaatcccatggcaattcactgctagtcttctgcaaaagacacatgacccagaggagaccctcagacacgaggaaagaggaactctgtaggggacttagaggcaatctctttaattggaggggctaaatagctttcctctcatggtttgcagctcagtgtaaggccaggcaagctcccaggaggccatccaggctgtgaggtccctagagaatctcagagaccacaccaaagggtcactcctgtcttagcaactgagtaggaagcattgttgccaccaaactgtacaaatctgagaaacttagtcaaggagggaagggaggactttggggcttagagttaagcagactactgcccagacaggcgatggcaaggacaggcagagtccaaagtgtcctttgagacagaagcagcatcaatggtgtggtgataatccaaggacatgatagaacttcaggggataaacacacacggattctagagaaaaactgtatacacggccagcgtggattagtctcaaagccaaggggaggtttgatgggactgagatgtcttcatgaggccaacccggagtgggactgccctcatttccagaggatttagtaagtaggtttgggcagagagtcaggctgggaccagctataaaggctttgccaatctgacttgacttagtgccataggaaagtgaaggcaggaaactgatgctaattgattctgggcctcttgttttctgcctcaaaatagagagctctgggattgaggagggaatcatactagcaccataaatggtttgaaaggtgtaaaggggaaaatgtgaaaacattttttatatgtcatgtcaaagtccagtctttctggagcacagcgtgtttgtaaggacacagagggaggtcaggctgaggaaagactgtagacaactgcaatgccaggctcaggatgtgggactttgcaggcagtggagagacagtgatggtttttgaggaggaagtgagatgatcatggttgtgttctaggattattaacctggcactagtgtagcaaataaattcgatctgagggtggcaggaaggttaaagaaaaaataagaacagccttagccaactgctttggagaacaacagggtaagctcagaaatgcccaattcgatacaataattatcacaaaaggagttgcatttgtaacgtacgtattactttttaatgtgccttttcatctgtcacatcatctggtgcctctggtgtgaccttccaagtccatcctccttcctgaccctatccatccaggctcagcccctgggagtgtgcccactgctcctacagtgccttccaccactggtcctgagttttggagaagacatagggagatgacaaaactttagaaacaacggaaacaatttagggaatggggtggtcactatgagaggaataaaagatgtccactgtagacagcatatatggtgcaagtctataatcttggaaaaagtcagactacattaatcttgttcaccaaatcctgaaatacacaacagggagagtcttttaaactttgaagatggtaagtttaacataagtagaaaagcagactctctcataccaaggctaacaaacctatgggaacctgttagtcccaaaagtgaaatgtgtaaattctcaaaacatgtacatatatatatataatctactcacacacacacaagggtgacagaaacttgaaggactgctaagagagctcaaggatatttatggcctatttaaacttatgaagcttctgtggaggaaatctgtccttctacactttgtccctgatgaaagagagaaaccctatgcttacagcaatatccaccaggagtgattttgcctcacaggggatatttgccaatgtctgtaaacatttttgttctcacactaggagaggggagcactattgatatctggtgggtgtagcccagggatgttggatgttgctaaacatcttggaatgcgtaggacagcccccagcacaaagaattattcagccctaaatggcaatggtgccaggttgagaaaccatggcttagggtcatgctcctgccctaaagtgccattgctattgtttgcaagtttaattattccaggagctatacctctgttaaggactgaattttatccctccccacaactcgaaattcctatgttgaaaccttaacacctaatgtgaatgctttggagacagggcctttaaataggtaattaaggtgaaacgaggttatccaggtggggccctaaggccccttataaggactggtgtccttataagaagaggaagagacaccaggagagcaaatgcacagaggccctgtgaggacacagtgagaaggcagtcatctccaggccagcgagagaggcctcagaatggaacctaccttgctggcaacttgatcttggacttccagactctgagaaaataagtttaagtttaagccacccagcctgtggtatcttgttatggtggccctggctaactaatcaccctttctcacttacctttagctcttccttactcaataagtttccactgaaaactagatgctggtgtggtccccctgcccgatgtgcacacgtggcccactgcagatggacctacacaagtggcgctggaaccctgaggggctgaggggaccccgcgtccaggccacccaggtgcggggtgagggggcaccccaacttccctggatcacatgggctgcggtggccggtggatcagggaggagaggcgcggggagcttgctgcaactcctcaccagggcaggagggaagatgccccccacctcctctagttcaccctctggattcaagtttgtcagcccctgccgctgagatcaggggatggcaccagatagaattttaattcaaaaggaagcagaacttaaagattaagaaaattcttagcctatccatattgtgaaaactaagaaatcatgttcaggacagaacaccagtggtgtgtctatgtaaccatcggatgaggaaattagtatggatcaaccatctcagtggaatctgggtgctattcatcaaggcaatgaaagaatgacccaaagacatttcagatcagggctgccactcctatccgaggtgcggaatacaagggcatgagggacagaatgatttcaaaggaggggctgcaggtacttgtggggcttcagcactcactatcatgggccaccttgaggctctgctctccacattccatcacagggctcctaggctaccccaggtatggctccaacagatcctggtttagtgagtgctgtgctctgaaaagctgtgcgggcatggtaacctccacctagatttcaaaggatgctctggaaagccacagtgcgtaggcagaaagccaccatgtgcagggccaccatggagagattgcactgcgcaatgcccagtgaagcagtagggtaaggccacccctgaggccctagaccaattgaaccactggtatacaatttcagcctgggagagcctcgggcacccagctgcctcagaggtagggccaccaaagggagcaactatgagggcagggctgcacaaagccatgaggcagaggccacctccccagtgtgcctggagggcagaaccttgattcaaaaagattattctggaaacttgacttgctcaggacctggtacacttttcttctctcccatttcttccttttggaataagaatttctatcctatgcctgtcccatcattatattttggaagcaaatagcatattcgatttcacagctggagagcaatttgcctcacaatgaatcataccttgagtctcatccatatctgatttatcctcttaacccttttatgtgtatagctcagttgggtaaataatattcacattgttgtgtgacaactctagaacttttttatatgcaaaatgaaactttatcctcagggaacaactccctatttcccgctcttcccagctcctggaaacccccactctgtttctattattttgactttagatatctcttataagtgtaatcatacagtatttatctttttgtgactggcttattccacttaccataatgttcatccatgttgtaccatgtaagaggatttcttctttttttaaggctgaataatattccactgcatatacatatatatatatacacacaccacattttctttattcatttatctgtcaataaacttttcggttgtttacacccattgtctattgtaaataatgctgcaatgtacatgaaagcagaaatatctttattaaatgctgattttgtttcctttgggtatgtatctagacatggaattgctgaatcatgtgataattttatttgtaaactttttaggaaatctcatactgttttccatggtggctgcaccatttccattcctaccaacagtgcaccaggattccagttcttgacatcctcgctaacacttgttattttttttgttgggttggttttgtagtggccaccttaatggctgtgagatatctatctcattgtggttttgattcatgtttctcgaataattaatggtgttacacatattttcatacacttgttggctatttgtatatattatttgaagaattatctgttcaagtcctttgcccatttttaaaccaggttatttgcttttttaattgacaaagaaaaatcatatatacctatcatgtacaacgtgatgtttaaaatatgtatgcattgtggaatggttaaattgacctaattaatatatgcattatatacttctatggtgagaacacttaaaacctactctcttagcaatttgcaagaatacaatgcattgttattaattatattcaccacattgtacactaggcctcttgaacgtattcctcctatttggctgaaattttgtaacctgggacaaacatctttccaaccagcagcattttcagctcctaataaccaccattctattcactatttttattagttcaacttttttggattcacatataaatgagattatgtggtatttgtctttctgtggcatatccacttaacataatgttcttcaagttcatccatttttgttgtgagtgacaggatcttactcttttttaaggctcaatagtatgccattgtgtgtatataccacattttcattatccatttatctgttgatacacacttaggttgtttccatatcttagctattgtgaacaatgttgcaatgaacatggagcataagtatctctatgaagtgctgatttcatttcctttgggtgtatgctcagaaatgagattgctggatcacatggtagttctatttttaattttttaaggagcctccatactgttttccataatgactatataatttacattcccaccaacagtgtacaagggttcccttttctccacacccttgccagcacttgttacctgcctttggcaatagtcattctaacagttgtgagatggtatctcactgtggttttaattttcatttctctgattagctatgtcgagcatttttttcatatgcctgttggccatttgtatgtcaacttttgagaaatgtcttttcaaatcctttgctcattttaaaatcaggctgttttcttgctattgagttgtttggattcctataccccttatcaagcatatggtttgcaaatgttttgtcccattccatatgttgtctcttcactctattgattgtttctttggctgtaagaaaaacaaggtttttagtttgatataatcccatttgtctatttttgcttttgttgcctgtgcttttgggattatatcaaaaaattattgcccaaactaatgtcatggagcttttcttctatgttttcttctagtagttttacagtttcaggtcttatgtgtaagcctttattctgagttgatttttgcatatggtgtgagatgacagtctagtttcattcttctacatgtggatattcagttgtcccaataccatttattgaagagactatgctttacccattgttggttcttggcacctttgttgaaaatcaattgaccatgaatgtgtggatttgtttctgggctattttgtcaatgcatctgtttttatgtcagtaccatgttgttttgattactatggctttgtagtatattagtatattttgaaatcagatagtatgatgcctccagttttgttctttttgctcacaattgctttggctattcaaggtcttttgtggttccatatgaatttaaggatttttttttctgtttctgtgaaaaatgtaaggaaattttgatagggattgcatcaaatctgcagatcactttgggtagtacagacattttaacaatattgattcttataatctataaacacaggatatctttccatttgtttgtgacttcttcaatttccttcatcagtgttttatagttttaagcgtataggtctttcacctcctttgttaaatgtatattttacttatttacttatttttagctattgtaaatgagattgttttattggtttcattttcagatagttctttgttagtgtgatgctactgatttttgtatgttgatttttgtatcctgcaactttacaagattcctttatttttttttcagtacaatctgtattctgttgcaactagatttctttattacttcatagtttttaagtggagttattatggttttctatttatataatcatgtcatctacaaacagtgacaatttacatttttcctttccaatttggatgatttttatttcttactcttgcctaattgctggctagaacttcagtactatgttgaatagaaatggttagagtggacctccttgtcttgttcctggtcttagaggaaaaaaatttcaacttttcaccattgagaatgatattagctatgagtttgtcatatatgaccttcattgtgttgaggtgcattccttatttgttgagagtttttttttaaatcacgaaaggatgttgaattttgtcaaatgctttttcagagtctattgagatattaatatggttagtattcttcattctgttaaagtggtatgtcacatttttagatttgagtatgttgaaacatcttgcatccttggaataaaacccacatgatcatgataaaagacccttttaatgtgctgttgcattcattttgctagtattttgctgaggatgtttataggctatttgtcattgttgctgctgttgagttgtagaagctccttatatattctggatattaacttcttactgaaaagataatttgcaaatatcttatttcatattgtttttcactctgttgattgttttcattgatgtgcagaaatgtttaagtttgatgaagttggatttgtgtattttttgttgcctgtttttggtcatatccaataaattgttgcaaaatttaatgtcataaagttttcttctatgtttgatagaacttctaggagtttgatacttttagctcttacatttaggtcttttatccattttgagttaatttttgtatttgcatatggtgtcaggtaagaatccaacttcattattttccatgtggatatccagttttcccaacgcaatttgtcgaagagattgacctttccccattgtatactcttggcaccctggtggaagatcatttgaccatatacttgagggtttacttctggaatagacagttgacattggggtactcagaaaacagcaagaatctaagagtgtttgagggtctattcttagaaaaaaacctttttcatacctcataatctctgcttttgtgaatcctttctatctttgaaaacaaaatccatacttattcattcatttatcattcattcatttactcacttacttaactcgattttattgagcacttagtggcaggattcagagtaaagccccccctgtaggacttacgtccttcagttatcctcagtttttaatgattcatgtttcatcttagctcctgtaactcttccatatggtcgttcatttactgtacccatagtgtcccgtatttgcatgggactcaaatatatatgtcttgaatctagacaagggatattgtgttttaagaagttataacaatgaacaaattccattcgcccagagcaactttctaatggattatatatatatatatatatatatatatatattttttttttttttttttttttttttttttttttgagacagagtctcgctctgtcgcccaggctggagtgcagtggcccgatctcggcacactgcaagctccgcctcctgggttcacgccattttcctgcctcagcctctcgagtagctgggactataggcgcccgccaccgcgcccggctaattttttgtatttttagtagagacggggtttcaccgtggtctcgatctcctgacctcgtgatccgcctgccttggcctcccaaagtgctgggattacaggcgtgagccaccacgcccagctctaatggataaatttaagacacaactataagatgggagtggctgaaaaagcagggacttcctaatgccctgaaatcatgtgataactttttatcttctctaagactgtctggcatggttttctcttctattatttttgacaaatgtggtacctctaggcgtgagtttttctttcacttctcatttctccaaccacaaatgctgtcacaggccaacagggagaattcagtgatacatcatactcatccctgagctgtgatgttggctctccacctctatcagccatcagattttcatattatcttgcctctctcttcctctttccttacaccaaacattgattcatcaaggagtcttaccactttactatacttccatttcaactcacactcaaattcatcactgataatgtctactttataaaatattccttcaaagcagccattggcctaatccccagatgatgccattgatccatgacaatagggagaataatgtctccatcattactttcttctcatagtcttttaattccttatacagaggctagtttcaactgcagaagtaacatggggtcctttgtctatcaaacactccccttgtaacattcatatctgctctgggacagaaatctgtcctttggacaccagagtaggaggtttaagaaaggccaaacgttgatacaatccaactgttgtagagtgataaggaaggcagtcaggcagcatgaggaagtgggaggatgggagttacagagaatttctgatgtagacaatgagcttcttttctttttcttaagggatttccacaatcctccactttgtggtattggggacagtggtaatgacagggtgggaagggcagaagaggcttatttcaagaggaagcagtaaaaggtgggcctgtgaggacctgtttagcaggctttaacatcctatgtacaagtccttatcttttgaagtgctctcctgatccaggccctgcttatcattattcacaaatttcagtgtctgaaataatccagaaggtggacaatcagacatccacagattaattgatgatttatacttattctccctctctccccactctctctccctttctcttctctctctcctcctctccctcccctccctccctccccctctctccttctccatctctccctctccatctctccctcttcatctcttcctccccttccctcccctcccctctccctcttcatctcttcctccccttccctcccctcccctctcctttctgtctctctcagctccaaaaaagaatgatacagagatgcataacactcctctctctcccatctgaaaatttagggatggggtggggtcctaagaagctagccttagaatctcttcctcttactgtggtttccttaaccctccatcatctcataactaatgataagtctgaaaatgagcttccgtattaattctcattattctgacaacagactctagaatccagccatattctactgtttggagccagccagggactttccaagtattcacagtgaaacactggcttccatgcctgggtctccccacccactgcctctgcacttggtgcctttgaacctctcttgttcctcttgcccttgctacttctgtatagatcacaagctccctccacacagcttcagttacacacatccgtgcagcaggaccttctcaggggcttagtctgccagaaactagtgacactgcctttcacccactttttattggatagagagaaatgttaccagaatttcccaggaaaagagcttctttgaagtctctacatgcattcagataaatcctttcccctgatattttccctccatccccctcctcacagccctgttcagaagcctgaacatgtcatgatggctggggcctcaaatccaggggacaatctgaggtgaaggtgagcaaggagacagtctacaaagaggccgtggaagctgtcggggaaggagaatgttcaagtagcacaggcaatcaaacacttcctattgctccaggtgccaaagcaggaatgaaaacctgtcccctctgttgaatactcttcttcttcactcctaaaactacacacctgatgttagtcgtcagccctcttcttatcactctacacctgctgctctggagaactcatccaggcctgtggctccctgcacgtctacactagtaacctctgaatccacggtctccagcactccctcctgctcccatccccaggtggcagtcaggtgcctgcacttggctatctcaacatcaacatcaccccaacacctgttttttcatgcattcaagggagattttttttctccccaagtttctttcaccttccctttggggttcctggaataaataatacaaaacttgaggttctcttgtgatgctgtttggagtcgagagagagacagagagagagagatacccccaggagggagttgtcccgattcttttccatcactcgggagctagccctacatctagtcttactgtttggagccttataaaaagatctcatgagcagccccctgggaatagcatgtctttgttctctgagaggcaatgatttttatctggaccccacataacttttccccagagagcatcacagtaaaagcacatgtttatcttctctccttaacttctgacatccttaaatcccaaggaagggtatggagggagacagattgatgattctgtgtatttgggtaaaccaggttcctggctaaaatcacttagtcaaaaatgccaagcatggtcaagggagaagggttagagagtctaaaagaatgaaatttggagacaggtaaacttgaaatttattctttccttcacctattattgtgtatgtgatttggggtcatattcttaactataactacctattgtctcatcttagaataaggataaataatatctatgttgaaacactgctgtgagcattagtgctcaataactattactactgtactaatgcaggttcttgattttaaacaatagaatgcaaacttgaataattaagcagaaaaggcatttattggaaaggaactaaacagctcatagaggatatgacaaaggcaggagttcttcatagttgatattgtatctccgtgcattgaatcaggagacacatgatgttgatttgttctgttatcagtgatgctaattttgactacttgattttagtggtaactgacagattttttcaaccataaagttactattttcattgcttgattttcgtatattaaacttaccctgtgatgctaattttgactacttgattttagtggtaactgacagatttttcaaccataagttactattttcattgcttgattttcatatattaaacttaccctatgttcatagaataaactcaacttggtcattattttacctagtgttatatttaattgactaatagatcttttaggagttttgtatctgtgtttaaaaatgagatgagccttacttttgcttttttgtttttgtttttgcttcatgcttatgaggatttggcatattgctgcatgagttgagaaatgttcctttattcccccgtcttttggaatcgcttgtgtaaggttagcaaatgccttcactgaatatttagaagaattcacccaataagatcatctttgcctacagatttctttgtggaaagttttgtaattaccaactcaatttctttaatagatacaggattatgaaaatttttctattatttcttgagttcattttagtaagtggtgttttctagaatatgtctatttcatctagcttttcaaatttgtcagcataaagttatttataatattttctattgtaattttaatgtctacaggacccataatgacagtacctttttcattcctgatattggaatttcatgccttctgtcttgttttaaaatcttccacagtcttgctaaaattttatcaatcctattagtcttttcaaagaaacaagcctttagtgttgttgatgtttttctactgtattattatttcctatcaaattattttcttcttttatgtatataattcccttacttttacttttcttgggttaaatttgacattctttttctaagtatatgattgattttcagtatttctttctttccaattaattatatgcacttaaggttgcatataatttttgtctagacctgacttcagcttcatcttatgttataatattttgtaatgcaagtataatttgcaatattttcaattttctttcttccttccttcttttctttttctttcctttccttttcttttctttcaagacagggtctcactctgttgccctggctggagtgcagtggtgctgtcatatctcactgcagccttggactcctgggctcaagtgatcctcccacctcagcctcctaagaagctaggacctcaggcatgcagcaccacaccagctaacttatattttatttttcgtagagataggatctcatcatgtggtccaggctggttttgaacttcctaggctcaagcaatcctcttgccttagcctcccaaagtactgggattacaggcatgagccaccacacccaactgatattttcaattttttattgtcagggatctgataataattagatttaatctctgattatcttctttgatctatggattattttaatttgtatttcttaatttctaaactcttcaaaattttttggttatctttctgtaattgatctctagctctgttctatttttgtcaaagaacattataaaagataaaatactttgaaatattgtattctttttcattgttttagtagttatgtttttcgagaaatttgtcttttttttttttgacaggttgctatgttgcccaggctacagtgcacgataaccccatactcctgggttcaggcaatcctcctgcctcaacttccctagtagctggtactacagatgtgtgccaccctgcccagcacaaaatgtgtccattttatctagattatctaattgttggcacgcaattgtacacagtattcccttatattgtttttcatttctgtaaagtggtagaaaggtctcatcttttattcctgatttgagtaattcaattcctttcttttttttcttactcaatctagctaaagtttcctcagttttgattctttaaaagcaaaaacttagttttgttgattttctctatctttttctatttcctagttcatttattcccattctaacattcctttcactagttctggtttgtcttactcatttctaatttcttttcttttcttttctttttttgtttgtttatttgtttgtttgagacagggttatttttttgagatggagtcttgctctgtcacccaggctagagtgcaggggcctgatctccacacactgcaacctccccatcccgggttcaaacgattctcctgtctcagcctcccgagtggctggggttataggtgcctgccaccacgccaggctaatttttgtatgtttagtagagatggggttacatcatgttggccaggctgatctcaaactcctgacttcaagcaatccaccctccttggcctcccagagtgctgggattacagagtgagccaccgcacccggcctcttttctaatttcttaaagtggaaggttgttactgatttgcaatttttcttcttttttaatgtaggtatttacagctataactttctcttttatcattaaaatgtccttacttttctctagtggtatgtttgtattaaggtctattttgtctggcattagtgtagccactccagctttcttttggttgctctttacatggtgtatcttttcctgccttgtactttcaacctctttgtaactttgtatctaaggtttgtctccagcagagaatatatagttgcatcatttttattttatccattctgctaacctgtctaaattgaaatgtaatgtatttatatttagtgtgattactgtaacatatttttatgtctgccatttcattgtttattttctatttttcttatatcttttttgttcctctattcctctattactgctttttgttgtgttaaatagacattttctatgtatcattttaattcacttatcatttcttttactctacatttttagttcctctacttttttgtcttagtgactaccctacagattaaaattagcatattaataatctagtttgtattaataccaacttaatttcaatagtatacaaacactttatttctatacagctctgttccctacccccgtgctgttattgtcatacaaattataccattcttacatgtgtgcctatcaacacagatttataaatattgtttgctgaagttttaaattaaataggagaaaaagtcattaaaaagtacatttatattgtcttttatattcacctatttcagttacctttttggtgtctttatttccttacatggatttgactatattacactatattctagtgtcctttcacttcagcctgaaagtattttagtacagctgtcttgctaatgatgaaatctctgtttctttttacctgaaaatgtcttaatttctccttcatttagagtttttggctgacagcttttcccctcagcactttgaataagtctttcaattgcattctagcctccatggttctctttctttctcttcctttctttctttctctctctctctctttctttttatcttcctctgtctctcttttttatgtttttacttttttcttttaaatagggatggagtgttgaactcctacactcaagcaatcctcccacctcagcctcccaaagtgctaggattaaaggcatgagtcaccgcacctgaccctccatggcttctaatgaaagatcatctgtcaatcttcttgcttgaatgtgataagtcatttctctcttaatggtttcaagatatctttgtcttcaactttcaacagattgattacaatgtgtgtaggtgtggatctctttgagtttattctacttatagttcattaagattctcagatatgtagattaacattttttatcaaatttgcaaagttttcagccattatttcttcaaatattttttctggcaccctttttttcattttaggactacagttatacatattttggtctgcttgatggtgttctacaggtctctgaggatctgttcatttttcttttcccatttttcttcttcttcctcaaactggataatcaaaattaacctacatttaactttgttgattatttcttctgccttgctcaaatctgctgtcaagccagtctggtgaaattttcatttctgttattgtatttttcaactccagaatttctatttggttcttttcttatataattcctgttgctgtagtctctattgggtggtgagacatcattcatatgcttgcctttagtaaacatgatttccttccattctttgaatatattttaaatgcttatttaatgtctttgtctagtaagtctaaatgctgggcttccttagagacattttttatttattaatttcccccctatgtacaggccatgctttattatttctttgcatgtcttgtaatttttgttgaaaactagatattttgtgtaatataatgtggcaacccagataatgagattcttccctcgctttcccttctagggtttgctttcattgtttgttgttgttttattttgtgacttttctgaacaaatcttgcaaagtctgattctttgttatgtgtagctattacattttttctcagttagcttagtggtcacctaatgtttgaacaaaggtttcctaaaatgcctggaataaacatatctcctagtctttcctggggagctttttctttgttttgtgttcctataagagaatacctgagatgaagtaatttataaagaaaagaggtttattttactcatggttctgcaggctggaaagttcaatattagacagctgatttggtggcttctgctgaggtccttgtgctgtgtcaaaacatggcagagaaacaaaaggagaacgaggtatatgtgaacaggacaaaacaagagaggcaaactcactttataacaacccactctcaagggaacttcataactaacccagtctttcaagaaagacaccaatccaacttaatgacctaagcacctcttaaaggcaccatctcccaacaccaccagattgggaaccaagcctcaaaataagttttgatgaggacaagccatattcaaaccacagcaggttctgtgtgcatgttggtgataccttcaacactcagccagacagttgacaactccactttaccctttatttcctccttgtacagagcaccaaggccagtccaagaagaaagcttacaatcttctcaggtctttcctaagtatgcaccccatcctacatatgtacatggccttctagatttccaggaatatgatggaaataatcaaagccccttggacatctcatttcccagattttccctttaagctttttatttaatctcttgttttcctcaactgttatccactgcctcaggcaattcggttgcctttaattgtttccaataaatattttcatggaaaaggatttttgcaccgggcaagttcccaatcaggtcaaatgagaactactttgcaaattgggtattccaggaaaccaccagacaggtaaaataatgacaattctctgatcacaaggttttggaaaagccccagctctgttctgctccctccaggctgctgattttcaccatgattacagcttgttggttctcaagtctactgcagaacccgagaggacagaatgggaattgtacaagttaaaatgtcacaaaactgttcttattgagattgcaccatttttctttagtaaatgttctctggattgctgcaagactttggttaatttccagagttctgaaagagttgatttttttttcaatttttgtcacttttcttgttgcttttatggagaggagagtttttggaggttcttactttgttatttttgccaatattgacccatctataggagtttttaaaaatttatatcatcattttttagttctagaatttctattaattcttttctatacattctatttctttaataaaatttttcattatgatttctattatctttttacatattcattatagctattataaagtttatctctaatccaataattaagttattcattatttttctcagtgatgcacttttcttccagaaggaattagccctatcctctgttaggcatatagagtagaaaatgatccttattttaatctggaatggatctgacttgaagcagagtttaagctttttctggctgtcattgtctactgtttcactgacatcctgatcccttaaatttggcagccccagataccattctttgtctctccatggccataagttgtttgctagaattatcagtctgttgctctgccctaaaaataagataatctttaggagtaaagcaactggagaatgttggctcctctcttgttatcttcttttcatgatcttgtcttctcaagctgtcatcaccttgagagttttatgattccctcaagcgtatattttttgtagttttttttcctttgagagggggtcttgctctgtcacccaggctggagtgcggtggtgtgatcatagctcactgcagactcagcttcctgagctccagtattcaagcaatcctcctgcctcagattcccaagtagctaggactataggcatgggccaccatgcccagttgattttttatttttatagagtctgggtcttgctatgttgcccaagctggtcttaagactcctaggctcaagtgatcctcctgccttggcctcctgaagtgctgggattacaggtatgagccactgtgcctggcctattttttgtgttttatctggctttactcattattattggaaggaacattaatattgtacaagctattccatcatagccaaaaagaggaaggcaatctacggtattgttttttattgacaactggggatagaattggaaactcaggtctttctactagtctcttccttcataatctcttatttcagaagtggaagttgatattggacatcttccagtagccaagtgtatatattgcattaatatagtatggatctgggagataaccgaatgatgtgttatgactaccataatctaccactttgaccagcaaaccatagtcactccttgttgggagaatacaatggatcaaacatacattatgtctgggactagaagaaaaataattttattcctcttcagttactatacggtaatcattaatcttagatactcctagaattaatgacactcattaaccagtttatcattgatgtcattgttgtcatagtaaattagaaatgagggattatcttcatcaatgtcagtatttcaagtaataccagcaagaaattaataataacctgtatagatgtgcttgggcagattcatttgaggctggggagagagaatagccaagtacatcaagtacatggtctggtaaaagtaaggcgtccagtatggctaaagtgtagtgtacaatagcgtgacagagagtaaatgactagaataatgagttgatgccttttatttactacttctctgcctctcgctgggtagagaggaggtaaacaatatcaaatgttggcaagtaacaatatcttattatggctttacattgaagaatcaaggcctatagtgattagtaagcacataaaacacaatattgagagttctaagatcattagtataagaatcagtcatccttagtttaaacctatctatgtccctgattaagcccgtgtaataatttaactatgcatggagtgaatgtaaagccataaatacattttctaccttgtgtatccccaacttaactttcccttatttgaatctctgaaatatctatggtcactctattgccgcctaacaaggggcaaaatgtatgatggatgagaagtcagaatgaagaaatacaacagtcttaacaatttgctgttaaattatcttactttttgcagattgtacaaaaatatatgatgttaaaaggctcctgcaagaaggggtcccgaatattaagtctttttagattaaaggtaagtcagcctctgtataaggacaatttcattcctatacttgctcttattttctttcctttttctctggatttggctctctcctatcttctttttcttgtcactctatttattcatcttttttttgcctatttaccaactggttgtaatttagaaatgaaaaatatgtatcttaatattttgatgtattcatttacgtaataatgtaagttctgaagatttggaatgtataagtgaaaatgtcattatgctttgtttctgtaaaataaaaactaaactacatgtttgggttgggggctttggtttttgtttttagttctaaaattttttgatacattatatttgaacatattcatgggttatatgtgatattttgttacatgcatgcaatgtaatgatgaagtcagggtgtttagggtatctatcacccacaatttatcatttttatgcattgagtacatttcaagtcctctcttctagtttttttgaaaaatactacacattgttgttaactatagtcaccctactctgctatcaaacactggaatttattctttatattagtataggttcataaccattaaccaacatctctgtatctccgtccacttcctagtctctggtatctatcattctactctctaccctgatgtgatcaactttttaaactcccacatacgagtgagaacatgtgatatttgtttttttgtgcctggcttatttcacttaacattatgacgtccacttccatccatgttactgcaaatgacatgatttcatctttttaaatggctgaatactttcattgtctatatatactacattttctttatccattcatccattcatggacccttaggttgattccatatcttggctcttgtgaatagtgctgcaataaagaatgtgtgtatccctttgatacattactttcttttccatttggataaatactaattagtgagattgcttgattgtgtagtagttctatttttagttttttgagaaatctccatattattttccatagtggctgtacttacttacattccaagcaatggtgaataagagttcccttttctccatatccttgccaacacctgtggtttttttgttttgtttgtttgtttgttttgtctttttcatagtagccatcccaactggggtaaaatgatatctcattgtggttgtttgttttgcttttgtagtgatgggatctcactactttgcttaggctggtctcaaactcctggctcaagcgatcctcccaccttggcctctgaaagtgtcggcattacagtcatgagccactgtggcctgacttcattgtggttttgatttgcatttccctgatgattagtaatgttgagcattctttcatgtacctgttgaccatttatatgtcttcttttctttctcttgctctctctcatttttcttttctcaatgaagagaacaaatgcctgtcttcttttgggaaatgtctgttcatgttctttgctcattttaaaaatggggttattaattaattaattaattaatttaattatttatttttgagactagatcttgcccaggttagtgtgcagtggtcccatagttcactgcagcatcaaattcctgggttcaagctatccttttgcctcagtccttcagctgggactacaggctcatgtcaccataccaggctatttggttctttttaattttagtaagagactgaagtctagctatgcttcctgggctgatcttgaactcctggactcaagagatcctcctgctgtaggcccccaaagtgctgacattacaggcattagccaccacacctggccaggattatttatttttttactatgaagatgtttgatttccttgtatattctggatattcatcccctgttggatgagtagcttgcatatattttctcccatttaagaggttttctcttcaccctgtagattgtttcttttgctgtgcagaagctttttagtttaatatagttccatttgtccatttttggttttgttactggtgcttttgagatcttagtcataaaatctttgcctagacctatttcctgaagaactttttctatgttttcttctagcagatttatagtttcaggtattacatttaagtctttaatctatcttgagttgatttttgtatatggtgagaagtaggggtccagtttcattcttctgcatatggttatccagtgttcccagcaccatttatagaaaaggatgtcatatccccaatgaatattcttcatagcttcattgaatgtaagtcagctataaatatgtggatttatttctgggttttctattctgttctattctttttttaaaaaaatttatttctataggttattgggaaacaggtggtgtttggttacatgagtgagttctttagtgaagatttttgagactttggtgcacccatcacccaagcagtatacactgcaaccaatttgtaatcttttatccgtcacccccttcccaccctttcctgcagagtccccaaagtccattgtgccatgcttatgcctttgcatcctcatagcttagttcccacttatgagtgagaacatacgatgcctggttttcccttcctgagttactgcacttagaataatagtctccaatctcaaacaggtcactgcaaatgccattaaatcattcctttttatggctgagtagtattccatcatatatatatattccatcatatatatatatatattccatcatatatatatatattccatcatatatatatattccatcatatatatatatattccatcatatatatatattccatcatatatatatatattccatcatatatatatattccatcatatatatatatatattccatcatatatatatatattccatcatatatatatatatatatattccatcatatatatatatatatatatatatatatatatatcaaagtttctttatccactcattgggttacttccacatttttgcaattgtgaatcgtgctgctataaatatgtgtatgcaagtatcttttttgtataatgacttcttttcctctgggtagatacccagtagtgggattgctggatcaaatggtagttctacttttaggactctttaaggaaactccacactgttttccatagtggttgtaccagtttacattcccaccagcagtggaaaattgttctctgttcaccacatccttgccaacatctattattttttgattttttgattaaggccattctttcaggagtgaaatggtattgcattgtggttttgatttgcattttcctgattattagtgatgctgagcaatttttcttatgtttgttggccatttgtatgtctttttttgagaattgtctattcatgcccttaactcatattttatgggattgtttgttttttacttactaatttgtttgggttcattgtagattctggatattagtcctttgtcatatgtatagattgtgaagattttctcccactctgtgggttatctgtttactctgctgactgttccttttgccgtgcaaaagctctttagtttaattaaggtctcagctatttatctttgttcttattgcatttacttttgggttcttggtcattaaatccttgcctaagccaatgtctagaagggtttttccgatgttatcttctaaaattcttatagtttcaggtcttagatttatgtccctgatctaccttgagttgatttttgtgtagagtgagagacatggatccagttttattctcctacatgtggcttgccaattatcccagctcaatttgttaaatagggtgtttttttaccactttatgtttttgtttgctttgtcaaagatcagttggctgtaagtatttgggtttatttctgggttctctattctgttttattggtctatgtgcctacatttataccagtaccatgctgtcttggtgactatggccttatattatattttgaaatcaggtaatgtgatgcctccagatctgttctttttggttagtcttgctttggctatgtgggctcttttttggttccatatgaaatttagaattgttttttctagttctgtgaagaatgatggtggtattttgatgggaattgcattgaatttgtgactgccttttgcagtatagtccttttcacaatattgattctacccatccatgagcatgggatgtgtttccatttgtttgtgtcatctatgatttctttcagcagtgttttgtagtattcctggtagagatttttagcctccttggttaagtatattccaagcattttttaaatttattttcgggaaactattgtaaaagggattgagttcttgatttgattctcagcttggtcattggtgtatagtagtgctacttatttgtatacatttattttgtaacctgaaaatttgctgaattcatttttcggatctaggagctttttggatgagtctttagggtttttgaagtatatgatcatatcattagtgaacagtgatggtttgactttctctttacctatttgtatgtcctttatttctttctcttgtctgattattctggctaggacttccaatcctatgttttgtcttttttttttttaatttgtaacttcccttttctttttctttttttatttttattattattatactttaagttttagggtacatgtgcacaatgtgcaggttagttacatatgtatacatgtgccatgctggtgtgctgtacccattaacttgtcatttagcattaggtatatctcctaatgctaaccctcccccctccccccaccccacaacagtccccagagtgtgatgttccccttcctgtgtccatgtgttctcattgtccaattcccacctatgagtgagaacatgtggtgtttggttttttgtccttgcgatagtttactgagaatgatgatttccaatttcatctatgtccctacaaaggacatgaactcatcattttttatggctgcatagtattccatggtgtatatgtgccacattttcttaatccagtctatcattgttggacatttggattggttccaagtctttgctattgtgaatagtgccgcaataaatatacgtgtgcatgtgtctttatagtagcatgatttatagtcctttgggtatatacccagtaatgggatggctgggtcaaatggtatttctagttctagatccctgaggaatcgccacactgacttccacaatggttgaactagtttacagtcccaccaacagtgtaaaagtgttcctatttctccacatcctctccagcacctgttgtttcctgactttttaatgatcgccattctaactggtgtgagatggtatctcattgtgattttgatttgcatttctctgatggccagtgatggtgaccattttttcatgtgttttttggctgcataaatgtcttcttttgagaaggggtgaaagtcagcattcttgtctccttccagttctcaaggggaatgctttcaacttctccctgttcagtataattctctctgtgggtttgtcatagatggctttcattaagttgatgtatgtcccttctatgccaattttgctcagggttttaattataaagcgatggtaaattttgtcaaatgttttttctgtgtcttttgagttgatgatgtgatttttgtatttaactgtgtttatgtgatgtatcacatttattgacttgcatatgttaaaccatccctgcatccctggtatgaaacccacttgatcatggcgtattatctttttgacatgctgttggattcagttagctagtgttttgttgaggatttttgcacctatgttcatcagggatattggtatgtggttttcctttttttctgcctattcccagttttagtattagggtgatactggcttcatagaatgaattagggaaaattctctctttctctatctttttgaatagtttcagtaagattgataccaattcttctttgactgtctgatagaattcagctgtgaatacatctggtcctggactttttcttttgggcagtttttaaattattattttaatctcactacttgctattggcctgttcagagtttctatttcttcctgatttaatctaggagggttgtatatttccaagaatttgcccatctcctctagactttctagtttgtctgcataaaggtgttcatagtagccttcaatgatcttttgtatttctgtggtatcggttgcaatatctcctgtttcatttctaattgagcttatttggatcttctctcttcttttcttggttaatcttgctaatggtctgtcaattttgtttatttgttcaaagaaccagcttttcatttcatttatcttttgtattcttggtttcaatttcatttatttctgctctgaaatttatttcaatttcatttatttctttgctatttattttattctgatgggtttgggtttggtttgttcttgtttctctggttccttgaagggtgaccttagattgtctatgttgactttttgatgtctagattgactttttgatgtaggcatttaatgctatgaactttcctcttagcaccacttttgctgtctcccagagtttttgtttttgttttgttttgtttttttgagagtttcgctcttgttgcccaggctggagtacagtggcacaatcttggctcactgcaaccaccacctcctgggttcaagcaattctcctgcctcagcctcccgagtagctgggattataggcacacaccaccacacccggctgatttttgtatttttagtagagatggggtttcatcatgttggccaggctggtctcgaactcccgacctcaggtaatccacccacctcggcctcccaaagtgccaggattacaggtgtgagccaccgtgcccggccttcctagagtttctgataaattgtgtcactattatggttcagttcaaagatttttaaaatttccatcttgatttcattgttgacctaaagaccattcgggagcagattatttaatttccatgtatttgtatagttctgagaattcattttggattcaatttccagttttattccactgtagtctgagagggtacatcatataattttgattttcttaaacttattgagacttgttttgtggcctaccataacatctgtcttggaggatgttccacatgctgatgaaaataatgtatattctgctgttgttgagtagaatgttctgtaaatatctgttaagtccatttgttctacagtgatatggtttggatctgtgtccccacccaaacctcaccttgtagctcccataattcccacgtgttgtgggaggcaccctgtgggagattactgaattatgggggtgggtctttccagtgctgttcttgtgacagtgaatgggtctcaggtgatctgatggttccgaaaacggagttgccctcacaagctctctctttgcctgccaccatccaaggaagatgagacttgctcctccttgccttccaccatgattgtcaggcttccccagccatgtggaactgtaagtccaattaaacctctatcttttgtaaattgcccagtctcagttatgtctttatcggcagtgtgaaaacagaataatacagtaaattggtaccggtagagtggggcaccacagaaaagatacccaaaaatgtggaagtgactttggaactaggtaacaggcagaggttgcaagagtttggagggctcagaagaagacaggaaaatgtgggaaaatgtggaactttctagagacttgttgaataatgatatggacaatgaaatccaggctgagatggtttcagatggagatgaggaacttgttgggaactgaagcaaaggtgactcttgttatgttttagcaaagacactggtggcattttgcccctgccctagagatttgtgggactttgaacttgagagagatgatttagggtatctggcagaagaaatttctaagcagcaaagcattcaagaggtgactggagtgctgttaaaagcattcagttttaaaagggaaacagcataaaagtttgaaaaatttgcagcctgacaatgcgatagaaaataaaatcccattttctgaggagaaattcaagccagctgcagaaatttgcataagtaacaaagagccaaatgttagtgcccaaaacaagtcccttccgctgcttcctctacccctgtgtttccctcagcttctaaatggactcagctccagttcaggtcagaatcttctcccatgatctacaccttcaggttccccagtgaggtatgcattcaagggtggaagatccccctttcccacctccacagtttgggcactcacagtatttgggatgtctcccaggtcctgcaggagcaatctgctcccttcagagggtctgtgggttctctcagctttcccagtcattcctgcaataggtctggagcaaaagttcatgatgcaagactccacaagctgctctgtccatccaagttggaggggcaatgtataatgcctcccgtccaccatgattctgtcccctattctgttgtattctattggtctatgtgtctgttttttataccagtactctactcttttggttactacagccttgtaaaatgttttgaactcaggtattgtgatacttccagctttgttctttttgctcaggatggctttgcctattcaggatcttttatggttctatacaaattttaggattgttttttatatttttgtggaaagtgacattggtatcttgatagggatcacattaaatctgtagattgctttgggccatatggtcattttaatgatattaattcttctgatccattagcatggaatttctttccatttgtttgtgtccacttcaatttctttcatcagtgttttgtagttttccttgtagggatctttcacctctttggtaaaatttattccaagtattttatcatattttttgtagctatcataaatggaattctcttcttcatttctttttcagctatttcattgttggtgaatagaaatgctacttatttctgcatattaattttgtatcctgccaagtctactgaattggcttatcagttctaagagtgttctggtggagtgtttggtttttctaaatataagattattttggaacttgctttatgagctcttgccaggaagatggcagacaggagacagggctgatgtgcagccccccttggatagatagaatagtactatgttgagtaggaggggtgaacatgtgtatacttgtcttttcccagttcctaaagaaaaagctttcaacttttcaccattctgtatgatgttagctgtgggttttgtcacatagagcctttattatattaaggcatgatccttttatgcctagtttgttgagagtttttattacgaaaaggtgttgaattttatcaaatgcttcttctgcatttattgagatagtcatatggattttggccttcatcatgttgatgtgatgtatcacattcattgatttgtgtatgttgaaatatccttgcatccttgctgtaaatcctacttgatcacattatattattgttttgatctactgttggattcggtttgctcctattttggtaagtatttttccatctgtattcatcaggatattcacctgtagttttctttcttggagcatccttgtctgggtttgccattagggtaatgctagcctcacagaatgagtttgggagaattccctcttcttcaactttttggaccagttggaggaaaatcggtggtggttctctgaaagtttggtggaatttatcagtgaaactatatgctcctggatttttcttttttgggagattttttattactgattccatttcagtactcagtattagtctgtccagattttctttcttcctgattcaatcttggtaagttgtatgtttccagaaatttatccatttcctcttgtttctccagtttgttaccatatgtttgttcataatggtttctgattatcttttgtatttatgtgggatctgttgtaatagcttctttttcatttatgatatggtttacttgggtattctcttttcttttcttggttagtctagtgtgggggttcagtcaggatggtgggagaaattgtaaaattataggatatagacacaaaccttcttggaaggccggaaggtatttgcaaaagtctcaagatagggttatggctgaaagcagcgtaatccttaccttgagttaattgcttggggcacagatacaaaggaacatttatctaaatagcttgtttactcatgtggtcgtaagaccaacatttgatcaactgcagatgcataattgctctctacttgggggggtcggcaaacaggtcaattgccctctagtggtgtgaacaaatgcgagctttgctggttgatcagggccatagatgcaactctttacagcaccttccttggtgtctgtgtgtggcctggaccctcagctgaactgacaagcaagatatctgtgtcagtgtacacctctcatccattactgggtcagggtctgtgggtcagactaccacagctggtgccccgcgtgaggaatgctgcaaggggagattgatgaaccccctgaaaatgaaggtgaaaaaggaactgcgcagtcagtgagtaatcagtaagtcattggtacttgcttgggatttccaagttcggggcgggggattgttcaggctaaggtttcatcatgggacaacagttatcagctcaacagaaacagtatataaaagtattgaaatggctgcttaaagctagcagagcctcagtttcacaggtttaattaaggaacctaatgcaaactgttgtatcccataacccatggttcccccaagaaggcatgctagacctagagctctgggaacgagtgggaaaaaatcttaagcaacatcatgttcaagggtaacgggtcccagtatcatctttaatgctatgggccttagtaagggcggctttggtcccattatacacagaagagcctaaaaaggggaaggacaaggcaccatcatgtattttaccacccgcaagttcctcagccctgatatcaccaggccaaaataacaaagaggaaatggaggttttgcctgagccccctcctccaatagataggaaaaaagacaggagacatgctccagctatgggaccttgtcttaagcaagtggcattggaaggggagctcttagcctgcctggtaatgcaagaccgacaaggcaatcaggtacatgaacccatttcttttaatgcttataaggagctaagaaaaagcattaaagaaaacagagctgctagcccatttatgaaaggaatgattgaggccttggcagaccacttttctatgaccccatgggactgggcaatgctaaccaaaacaactttggagcctagccaatacctcctctggaaggcagaatatgatgagctgtgtgaacaacaagctaaccagaatcaggcgacggggcaagacctaacagctgctatgctccaggggaaggatccccatgcctatgtacaacgactagattttgattccccaggcctaaaatcaagtgtctttgtgtgctctcagggcttgggactgaattcctgaaagtggagtttagcaaggatcttttataaatgttcaacaagggcctcaggagccatttgttgagtttttcaattggttaacccaggcaattaagagacaaattagtcacgcccaggctgctgatatcttattgttgcaattggcttttgaaaactctcatgtggatcaccagcaggcaatgcaggcaatcagaagaaaggcagccacagtcggggaacttatatgagcatgtcagctggtgggaactgagacacacaagccaaaatattggttatggcattaaggcctcctaaagtgaaaagggagagaagccaaagttgttttctatgtggagagccagatcatatgaagagggaatgcccccataatagagacgaaggtaactcagggaaagaacccccttctatatgccccggatgtaaaacggtgaaacattgggcaaatcaatgcaggtcaaaatttgataaaaacagaaaccccataagtaaccaggtgggaaacttcatgatgggctggccctaggccctgcttcaaactggggcaatcccaccagctttcctcggtctgatggagagctcacagtcctctctctcagagcagccaccactgggagtgcaggactggacttactctgccccaacaaatcagtgctgaaagaaggagaagaccctaaaagggctgcatacgggatctggggccagctgcctccagaagcagtgggattagtcctagggcggtctagcctgtccagtaaaggaattaatgtgctcactggggtaattggtagtgattaccaaggtgagatattggttatgatggaatgtaaaggtctgaatattcttccccctggatcaaagatagctcagttactgattttgccatactgggtccccagtgcccacggaaaggaaaggggaaaggaagttttgggagcacaggagccacaggagtatatgggaatcaattaatcactgatcagagacccatgattatcttaaaaattggaaataataattttactggcttattggacacaggggtggacgtttcaatcattagtgatcaaaactggctagaaatttggccttgggtcactcagaaataaaaaatggtctgcatcagggaagcacacagagccaagcagagcatgcaccccctaacctgttgcaattcagaaggaagaaaggcagttatacaacccgtaagcatgcgcatccctgttaatctttggggacaggatttattagcccaatgcgggaggggtgactctcagccccctttataacaatggccactgttattattcctcccctacccccgtcgtagctctctcaagatccaatttgagtagaacagtggcctctgaagggagagaaattacaaaaagcctgtgaattagttgaagagcaattaaaagctgggcatgtagaaccatctatttgtccttggaatttgcccattttcatcattcccaaaaagtctgggaaatggagattttgcatgacctatgtgctgttaatgctaatttgcaacctatgggaccccttcaacagggcctcccatcccctgtggcgattcctcgagattggcctataatcattattgacttaaaggactgcttttatatgattcccccagcagaacaggacagagaaaaatttgcatttacaataccagctatcaataatgaaaggccagcttgttgatttcattggaatgtgcttcctcaagggatgctaaacagtcctaccaagtgtcagtatcatgtaaatcaagctttgctcccagtagaaaagaatttcctaattgcaagattattcgttttatgaatattttaccagcaaccccaacagagccaatacttttaaatttatatacctctgtcataaagaataaacagctaagaggtttaatcattgcacctgaaaaagtacaactttctctccttggaaatatatcttgggtacatgctaacttcctggtcagtaagacctcaaaatgttaaattaaatactagcaacttacattccttaaatgattatcagaaattactaggtgatatcaactggctctgccccactttaggcattcctacttataagctgcaaaacctgttttctatcttaaagggcaatatagccctgaattctcccagatatttaaaccctgcagcaaaaagggaaattgaggaaatagaacaagccatctctcagaggcaactagatcacatagacacccattatttcatccagttgtttattttccccaccaaacactccccttcaggattaataggaccgatgaccccaggactgcgctttctagaatggatttttttttgctcacataccaggactaaaacactctttccctacattcagttaattagtaaagtcgtatattcaggcctcaaacaatgcagtcagttgctaggctatgatcctgatatcctgaaatcatcaggattcctttaagtaaaaagcaattagaagcagttttgtccctattgttagatctgcaaatagctctctctgattacacaggacaaatagagcatgttcttcctgctgataaattccttcatttcttatctcatactcctgtgatcttgccaacaaaaatagttcactcctccatacctaatgctttaacattgttttctgatgattcaggcaaacatggaaaggcggcaatctggtggagaccacataattcactcactcaatctgggtttactagcattcagagaggtgagatcggggccctgatattggccttggaaactttttctactcagccatcaatatagttagtgattctgcctactttgtttatttattgcaaaatcttgaagcagccgtaattaagtccactctggagcctgccctgtgtgctctttttctctgatttcagcaattgctagatcaatgtacacatcctatttttattacacacattcgagtccacagctcactgcctggcccactggcttatggcagtgatcaaggagaccttcaggtgatgacatcactgcttgaccaaaccacccaatcgcatcaatttttccaccaaaattggagaaacttatctaagcaatttcaacttacccagagactggctaaacaaattatcccacaattctcaaattgccagctaacaggcatgtcccctccttcaaaaggtgttaaccctagaggattagaacctaatcagttatggcaaatagaagttacatccctgaaattggaaaactaagatatgtacatgtatccattgataccagcactcatctaattagtgcacacgctcttccttggagagtccactcaatatgtcattaaacatcttctttcaacttttgcatgtatggggcggcccataaaaattaaaactgataatggtccagtttatgccagctcacaatttcaacaattttgtcacacgtggaatatccaacgttccataggcatcccgtataacccccaaggacgggccatagtagaacgtgcccactccagccttaaaaatatgctcaaaaaacagaaaagggggagtatgggtaaagaccctgcaacactattggcacaagccttatttacccttaatttttaaaatgtagatgacaaatttcaatcaactatagagaaacactttttgctaaaacctctcaagacataaaacctgcagttttatggaaagatgtaagcagtaatgtatggtgtggtccaaatgaattgttaacttggagaagagggtatgcttgtgtccacaccccctcaagtcctctttggattccagcaagacacatcaaaccataccatgacatggctaggactcaacccggtaccagaaatgaaggaactaaccctgcaggacccacggtcccggatgatgcagcttccgtggatgacacaaaccctagacattactgggggatgctgaagaggacaactcaggaggctgaatgaaccctgctctggacacagacaccattcactccagataatttgctccttgctatgatttctgttgtacattgcaactcatgtagggtattgatcctttttatgctcgtgctttgtctgcaacctgttcctgctacactctattgggctcatatcttagatccgcctttctttcaccctgtcacctaggcagacactcccttcccaacttttaataacataactgcttggctaggagggatagatttacccccagtggggtccctcgataatggcatacactggactaaggtgccagacacactacatatcactccactatcctcccactgtgtgtaagttataaagattataacccttactgtgtacctgcccaaacacaattatggctacatcatggcaaaagaaatgcctttaaagtcttagctgcaggtagcttcaaatcaggtaatgcaatcaatgattctttcccaaacattccttcctgtgctaaagaataaagctgggaaagtaatggattccactttagctgggaggtctgtcacggggaataagcttgtagcctccagctaggccattataataccttagactggagcccccacggccattttcagggcatccttactgatgtcctcatctatcatggtgttaatcacagttttgtagcctcatcacgttcccctatgatttaggccaatgggggggatgggttatcccataccccaagtaaagtccatgctacccaagacactttacggtacctgggacatcttagcacctccttttcacctggcatgggacatatcataattccagtggcaaatacactataacctttattcataatcacactgatcagtgcctaatttatactacccatacatatattttccttatggaaactgatacttccattacaccccaaaactccgcatttgtgacccaggtgcaggaacaggcttggtttgcctcatgtatcactaattataatacatctaatttaaatattactagtgtcatggtattaaggagacaatctgaggcattcctacccagtcaatttgacatgcgattggcaaggttcctctgcccttgccacctaagaatgtgccctgtcctaggccagacccaaaagatacataggcacacttacagcctttatagtctcagccacagtcatcctagcaactgctagtgtggctgtagcagctattactgaatcagtacaaataggtgcttttgtagataatttggccagaaatgtgtctaatgaacttctcttacagcagggtatagagcaaaagattcttgcacgtctgcaagcccttgaggcccttgaggctgccctggaatatatgggggagtaacaagatgcactggtattctaacagcaactaaactgcgactgggcgcataaacatatctgcgtcacttctctatcatagaatcaatcaatacatagttgggatgaagtgaaacaacacctctggggaacatttcatgacaatttaatagcagatgtaaagcaacttcaaactaaaattttagaatcccttcccactatagatctacacacccaacaaacagccatatggaagggtgtgcaagatcatcactcctggttagacccccgctcctggggttcactctttgactggaaaagaatattgctaattattctcatgattgtcttatgttatttgctaattctaggatgcaaagccggaataaaagcgatgactgccttgcctgacagacgtgttgctgcacacaactgtacacttcagtcaacagaagagcgtgtgcacttattagatgagtgttggtatcaatggatacatgtacatatcttagttttccaaattcagggatgtaacttctgtttgccataactgattaggttctaatcctctagggttaacaccttttgtgttagaacctgtgaagtagaagtaactcagaagtgctcctcagagagtagacagctctttctctaaccgtttccagctcagtagaatttagaaaggcttctaggaggccaaccagtctttttgatccaacattgaattgtaaaaccggatatggaagccaaatttcacagtggatctaacaaagtagctaatgggtactatgcttctgagaacctgaacaggcctctgagagctgtaactagaagaaaagtaaagactccggactccagcaccaagcaggttttccttagcaatttacaacctgaagctccaaggaaaaactattttagcatacaccaaaactattcccatgtgccaacaggtaaggagacttgtacttatattctgttttattcttctctaactcgtttctgtgcactatttctatgttttctccttagttttaccttgcctgggtttgcccatttgttattcatatctatttatcaatcccaaaatactaaaaggatccaggcagggcagctttaattggtggctgcacagagtgctacttcctgtgaggcagcaattctaaccctagttggcatacacttcagattttctcaacagcagaagatgtaaccttcccaagaacccacttcaaccctcagttctctcacttctatgtccacgtgacactctgatacattttcccactatgaaacagaactgttctcttgatagcatgccatacctctcccttctctgcaactcactcaggacaatctcagtacctttattacctggtcacaagtgaggatgcttcacactcaaatctcattggctggagggaaagtcattaagcagaagtgataattcttgtcatcacagctttctccaaaccttctccatcggcattttactctcactcttagagcttagcttcaaccatcaaacagacagttgagtgttcaacagtccctttatgggacagatttttttagttgactgtgtattctaaccctgagcaatggggcccctggctaagagagagaagggaaagcagagagggaagtgttgcaatgctaccttttcagagaggaaatagagacaaatagtttttatgggtgtaatacacagcctccactgtcccacaataagagcaattgagcttaaataccaaaaagggcttttctatgtgagctgaaaacagaaagagagagcaaatgggaggatgggctggagtaatcttgtttgaagttctctcatcctaaggaagaaccttttcttcctctgtcatacacgagtgcttagggcttacataagccccatctgcacgctgctaggagcagatcatcctactcaagacaataaaaaaggaatcatcatgtaccttacatatttagagatacgtgcgtacacttttctcataaataaagcaacacacccctgcctgacctcctaggacctccatagttgaggtatagttatttggagtcagagattcttaaaccaatcctggttctgcttttttcacttcaccaaaccaaacttgaccagattctttaatggctccaaaatcacaaccctttgaactattttactcctgttttccattttcctttatacctctgtccaggtggtacagatttttcttaaaaatctatgtctgagtgtacagagcttcaagtaaagttcaagcagggaataggagatctatcaccttccttattacagaaatattgctgatattaatgcaggctaatgttatattaagtcccttgacaggtatatcaaactatttggtcttatccagttggtggtcaaccagatagttataagtgagatggagagacaggtcattctcttcccatagccctctcttccttaccctatttaccccaaaacgctgaggcaggaaataatgcatactcctttgtgcactgctcctccatttcccatttttaaatggagacatacttaaggcataatcttcagccctttgctcatctctctacactcattctcctgcagatctcagtcaccctcatggcatcaatcatgatgccacagaaaaacccattagtgtatagtctctggcttcatctcagtatatgtactgggcacatccgtctggatgttccgtcattacctcaaactctgtccttaatttttttgttagaaacatctcttctctacaaaccatgctttgtgttcagcatgctcatctggcatccagtttaagaaggatatcttctggccatgatttgatttttgtatgaaaaaaatctttgttgtagaaatcagcatactattttttttttattattattattttattgatcattcttgggtgtttctcgcagagggggatttggcagggtcacaggacaatagtggagggaaggtcagcagataaacaagtgaacaaaggtctctggttttcctaggcagaggaccctgcggccttccgcagtgtttgtgtccctgggtacttgagattagggagtggtgatgactcttaaggagcatgctgccttcaagcatctgtttaacaaagcacatcttgcaccacccttaatccattcaaccctgagtggatacagcacatgtttcagagagcacagggttgggggtaaggtcaccgatcaacaggatcccaaggcagaagaatttttcttagtacagaacaaaatgaaaagtctcccatgtctacctctttctacacagacacggcaaccatccgatttctcaatcttttccccacctttcccccgtttctattctacaaaaccgccattgtcatcacggcccgttctcaatgagctgttgggtacacctcccagacggggtggtggcggggcagaggggctcctcacttcccagtaggcgcggccgggcagaggcgcccctcacttcccggatggggtggctggccgggcggggggctgacccccccacctccctcccggacggggcggttggcagggcagggggctgacccccccacctccctcccggacggggcggctggctgggcagaggggctctcacttcccagtaggggcggccgggcagaggcgcccctcacctgccggacggggcggctggccgggcggggggctgacccccccacctccctcccggaggaggtgactgccgggcggagacgctcctcaattcccagacagggtggctgctgggcggaggggttcctcacttctcagacggggcggttgccaggcagagggtctcctcacttctcagacggggcggccgggcagagacgctcctcacatcccggacggggcggcagggcagaggtgctccccacatctcagacgatgggcggccaggcagagacgctcctcacttcccagatgtgatggcggccgggaagaggcgctcctcacttcctagatgggatggcggccgggcagagacgctcctcactttccagactgggcagccaggcagaggggctcctcacatcccagacgatgggcggccaggcggagacgctcttcacttcccagacggggtggcggccgggcagaggctgcagtctcggcactttgggaggccaaggcaggctgctgggaggtggaggttgtagcgagccgagatcacgccactgcactccagcctgggcaccattgagcactgagtgaacgagactctgtctgcaatcccggcacctcgggaggccgaggctggcggatcactctcggttaggagctggagaccagcccagccaatacagcgaatccccatctccaccaaaaaaatacgaaaaccagtcaggtgtggcggcgcgcgcctgcaatcgcaggcactcggcaagctgaggcaggagaatcaggcagggaggttgcagtgagccgtgatggcagcagtatcgtccagcttcggctcggcatcagagggagactgtggaaagagagggagagggagaccgtggggagagggagagggagagggagagggagaccgtggggagagggagagggagagacactattttttaaaatatggagagaagatattctggtggctgaaagtgtggtctggtgtcagatataaatgtgcaaatgccttcttgctgtcctgtcggtctcagtacattcaccttatagctgctggaaatatcgaaggttccttttttgtttgtgtaaactctaatttctatcaaggtgtcatggacttttaaaattagtatttcattacaaatgtctcagcattggtcaatttttgccaggaccattattgatcaagcaaataaattcaacagccattaggaaaaaaaaagaaggccatcttcttttttcaataaatgtattatatagttaatagtttcatttatatagaatgcatagaaactgttcacagaatgtccagcattttgtatttttgcagtagggaacatttcttcactgaattccactttcacattagataatttaatagttttatggagaaagtaaaatgcccgcccccctcccccacccaaaattgaaaatttcagttgttggttttcatggacacaccttatcaggtaattcctttttattcctagttttctaggactttttatcatgaatgagcaaatgcctttttctgcatccatttacataattacataatttttcttttgtattctgttaagatgtggaatcacattgattttttgcatgttaaacatgccttccattcctggcataaacttttatgatcatgttatatcatcctttttaatatattattgaattcaattttaaaaaatattttgttaaacattttcatggctatgtttgtgtgtctttagtttccttttcttttaatgtcattgtttgatgttagtatattggacttgtaaattattgggatgtgttttcttctgctcttttgttgaaagagtttgtattgagtttgtattgtttcttccttaaatgtataatagaattaatcatacagacattaaaagtattatgacagtattatgacagaatactatggattaatcaatgaagccatctgacctggaaaccatttggccttctctgtgagaaggatttttaaaattacaaacttaatttcttccattgacagagatttcttcttgatttagttttggtaatttgaatcgttcaagaaatgtttctatttcatgttgttaaaataaaaattttagagaagttgaatttaacagagtttatttagcaaagaacaattcatgaattggggagccctcagaacccagaaagattcagaaagctctgtccagcaacatgtgaaggcagtgtttatagataaaaacaggaagtgatactcaaaaccagccaatttattacagctcagtgtttgccttatatgggcatggcgtgatgaggcatttgcttatgggggacataatatgatcacttggcagcctgtgattggctgagactcagctatttattacaacactcttaagttaggctgtagtttgtttgcataacgcagttatgttaagttgggttagtttgctatgtaggaatttaagatatggagaaagctttacaccaaatttaatttaatttaacaatgtaaattgtcaaatttattgtcatttttgtttattggcattttcatagcattctgtcataatacttttaatgtctgtatgatttgttgtgacgtacccacttccatttctgatattggggatttgagtcttatctctttttcttgatccatctacctagagattcatgaatgtattgagccttattgaaaaccagcaattgactttgtttattttctttattgtttgtccattttattgcatttatttctgatcttattaatcttgggattcatttgactttttttttctagcttcttaagatgggaacatagatggttgattttagagtttccctcctttccaattatgtaaagttataaattattgtgtaattagtgtatcatactaattttgatagtgtgctttcatattcactcagttcaaaatattttctaattttccttctgactctttttaaatccaggtgctgtttagcagtatactttttaatttctaggtatttgggactttcaaggtatttttctgttattggtttctaatttaatgctattgtggtccgagaatgtattctgtatgatttcaatagagacatttatttatttagacatttatttatatgtgtttatgacccagtgtatagtctgtcctgtggaatattcttgagcatttgaaaataatgtgtattctgccactattgggtggaatattctacagatcttgattagatcacgttggttcattgataatgttatttaaatctatcatgtcctcatgaagttttttcctaaatattttattgtttactgagtgctagaatactaaaatataattgtgaatttgtctatttctgatttatttttatcatttttggtataatgtgatttaagacatattttctagaacaaacacatttaggattgttatatgttgataataaaatgatcttttatcattatgaactatccttctttctccttggtaatatttctgagtcttatatttctgatattaacacagccaccaatacttccatggttggcattattttcgttttttttttttttactttaagttctgggatacatgtgcagaatgtgcaggtttgttacatagttatacatgtgccatgtggtttgctgcatctatcaacccatcatctaggttttaagccatgcaatacattcggtatgtgtcctaatgctctccctccccttgctccccatgccctgacagaccctggtgtgaggtgttcccctccctgtgtccatgtgttctaattgttgaactcccacttacgagtgagaacgtgtggtgtttggttttctgttcctgtgttagtttgctgtgaaggatggcttccagcttcatccatgtccccacaaacaacatgaactcatttttttatggctgcatagcattccacggtatacatgtattttcccattcttttactttttacctgtctttgccttcatatttaaagagggcattatgtagagagcatgaagttggcctgtagatttttttgtgcattctgacaatctttcccttttcattagaatatttaggccatgtgcatttaattcaattattagtatggttgttttaaactctaccatcttacagtttgttttctttttgtcttaccagactttcccttttttatttctttattttgaattaattatgcttagtgttctattttatcttctccattggcctcttggctatacctctttttttttcaatagttatcaggagcttaaaatattcatcttaatacattctaccttcaaataataacacaccacttaacatgtataagaaacttacaacattatacttccatttctcccttctattctttgtgccattgtcatcatattttacttctgggtatgttataaacccccaaataatttttactttaaacaattccttttttaacttaaaaaaaactagagaacatgtttttatatttatctgaatttttaccatttcatgcttttttcatcgtaatatctaatgaacactcataaagaaacaaaatccttgctcaaataagatatttttcttcataatcatcactattctcaaacctttgaaagctctggtaatcatgatttaagttctcccacatggagtgactatggctggtaaaaattgcaatgaattagggcattttaaaaattttatttcttggctcttagtttatcatgtagaaaaatcctccatgaaatattgctataattacaatacagccttgggaaggaagctcaggggctgtgaatggaatcctaatctgcctgaaatcttgatccagacagaccaaatctcttccctcagagacttcaaacactgcagtcttcaaactacatccaagaaaatcttcatccaagtaaaatttcccccaaatatcctttctctaccccaccctatcctgtagttagggaaaaacccaggactgaatcaatatcctcagacctttccgttcaagtgggatcagaacctttagtaaccacatcggcaacagaggttgaaaccacaccttcaagaaatagtattcacatgtgacctggtcctagacttccagtaagaatgactcagagtctccccgctctgaaatactgaagtatttattggtcttagggtattctcgggaaggtgacagtgaggggttcttcaaaggagaacagaggataaaaggctcaatgaaaggataatctccatattagtgctaccaaagtgtcattaatttctatttgttggaaactttactaaggaatgactgctttgaggtaatggataaggacagagcttgaagggtcagcaattcagtcagccactggagtagttttcacatgaagtgagaagaaaagctgagatggagtttgtagggcagctggagttcagatctctcctaagtcctcttctgttcagatattttgtcacctgcagcaacacacacagttattgtcattcctgggttcagtactgtaagcccggacccatcttccccactccctttgcacccgagcttcccatttctctgccctgttcaggtcccagggagaaggtggtcatccctgcacatgccctggtcctccagtgaagagcacataggagccaaggagttcacgaaagtcattgaatttcaccctcaaaccccagctgactgtgaggccatcccacatgcttcatgtctccaaaatatacagacaaggggaagggccacattactgagggcagagaagaagcttaaccctggaatgagaattggaagggacaaatatccaaaccatatcaatgacggcaatgaacgaaggatacttgctcacattgtgtatactgctctttgaaaggatttcaaaaaccaaggtaaattttctaaaatgacctctgttgaacatctgacagcagtacttcctccttcctgaattctttaattccttggctcatgtgacagcatattctcctaattcttctgcttctctgcttctccatttttgttaaatactcctctttggatgttttgttaatcatgtatctttgcattaattttgccttttcaagatatttcattaaaatatganttattactgagttcttttggtatcccccaaattttgcacctaagccaggtgcatcccctacatcaccctagtcccagccctcttttccattcttcctcttaacatctgacattctacattcacttcactctgttacaaatcattatagatataattataaatgtgtgtgaactaagaaaaataaacaagaatttgtcctactggatactaacacacactacaatgtcatagtaatcaaaatactaggacactggcacaagaagagacaaacagaacagtggaacaagatggaactcagacacaggcccacctataatgggagctttcagtatagcaaaggagacactactaacctatggggaaaaggtgaactatttagtagttgtgggaacacactggcccattatataaagaaaaataaaacatgatccccatcaaacacaaagatgaatcccagatgaattaaagtagtaaatgtgaaatttaaaactgtaggagatgttttaagagtatctttgatatctcagtatagggaagacttcttttaaaaaagacacacaaacaaaaatacagttgatggacttcattacaaaatattaaggatttctcttcaataaaggaaaccaaggagacagttgccagaagtcagattagaggaaaacatttgcaatgcctaaaactgacaagggactactagcaggactatataaggatcacctgcaaatcaataagaaaatgatggaagcacatagtacaaaaatggacaatgaatgtgaacaggcaatttatagaaaaggaacccccaagtggctaatcagtcctaattatagccccaattattagtaattaaagaaatgcaaaataaaacagcatatttctttatgcacatgaaattggcaaaagttagaaaactggataatgtccagtgttgaagtccatttaggagttgcaggacaattagagtactgacaaaggaagttcagatgagtacagccattctgatgagaagatgagcagtgtttagtcaaattaaggagctgcatctccagcaaccctgcaacccctttctaggatacatacattccagggatgcaggtcaggcccacatgtatatgcagttccatgtgagatacaagcattgcttgcaatagtagagaaccaggaatgatccaggtatcccaggagcaatgtagatatgtggattaatatgatttggatatttgtcacttccaagtctcatgttgaaaattgatccccagtgttgcaggtggggcctggtgggaggtatttgaatcatggaggagaccctcatgaatggctttgtcccctctccgggtaatgagtgagttctcactctattagtgcacatgaaacctggttgttaaaaagaggctggcacctctttctatgtctctttctccctctatgaccatgtgatgcactggctccacttgccttccaccatgagtaaaagcttccagaatcccccaacagaagcagatgctagtgccatgtttcgcgtacagcctgcagatctgtgagccatttaaagctcttttcttcgtaaattaggtaacttcagatattcctttatagcaatgcaaaatggactaatgcatggacatataaagtaaaatactatggaagatttggaagaaacaaactggatgtacaaaattagatctataatttaatgccattttggttaattaaaaatacatgtacactggacactactacatattacagaggatctatgcaaataaaaggaaacatcaaattcattaaaatgtttacctatgaggtaggggtaagaggttagatatgggagtaaggactggagataaaagggaccaaataaatcaagggagagagagagagctcggaggcaccaatgatgatcatataatgaactgagaagttcttaaccttttgtacctgaggtccagcatgaataacaataataataatgaattagatgtggtcatctgcatggaagttcactgtctaatgctaagagaattcccaaaacatataaaaatataaagcatggtgagtgttatgataaatagaaacctgtaagatctctggaggggcattttttgtgtgaacattgccatggaatgagtccaagtagagacagtaagtagttacaggcacccaccacactgtgttgtaattatgtatagaaatatagatctgactccattatttggcaatggactctggagaatttgaacttggtcttttccttcacaaaatagggtgaataggacagtggataaacagtcttggatccagactttctggattggaagctagccctactacttcatagctgtgggaacttgatcaaagtgcttaaagtctctgtgtatgtaaaaagatgtaagtatctctcatgtgaaatagtgaaaataatagtacctacctcaaagactatgtgtgagaataaagtgagttaataaatgtaaatcctcagaatagcgcctgaccatattaactactcagttagttatcggtgttgttgttgttatgtggctgaatgcttttaacccattagaagatcaatgaacacttatcagattgaatttttcctcccttccttacattctacaaatcctagggcctcctctttacattcccacctttacagtatttcacagggtcccctgggcccgggggtcatggccagaacgcagagactttatgatgaggacggtgcccacgatgatgccgactaggcccagcaccaggcccagggcacagagcacagtctccgttgtctcaggcatctggattggctcttgggcctctgggggaagaatgaagagatagggtcaggaggtgcagtgagggtggtgatggcctgggatggttgtgggaattgaaggttatggaccagttaattggatgttaggacgaggagaggactgagacccagccagtgcggaaagctggtgcagaggacaccaggtctttggaatagaggatgccaggagattatggagagaaaagcagttgcataccccagtgcttgaggagcggctggtccaagccccagtgctccaccctgcagtcatagaagtcctctgctgagggcacaaaggtcaggtaatggaacttgtggaagctgtaatctgttctgggcaggaagaggctctcagcgacaccctcagtgaccagctccccgttgcacagccacgtgacgttgagcactggtgggaagaacttgtcaatgtggcagatgagggtgttgggctggcccagctccacaggctccttgggaaacacggtcacctcagggggatctggaaggagacagcaccaggttaggcccctcttctgggatgaatcacaaaggctccacctcttaggggagggtggtcctctacctcagccttagattttatggcagctctgaatcacagagaggggtatcacaccactgaccagcctcactctgctcacctttctctctcctgagaagagaggatgcaagcccttgctgtagtgggatcagcccatggccactaggggaagaggatcacacagcagggggcacttaggcttcctagtctgagggtggcagagaggccctctcatcccttccagttgggctacagaggaagaggcaaagatagggcgtaccgttggtggcctgagtgtggttggaacgctggatcaaggtattcaagttgttgttcaatatagcaatgttagccagcccgccctgagcctcaaaggaaaaggcttggccaaactcctccagatgccagacggtctccttcttgtccagatccacatagaacatctcatcttcatcaaattcaaacataaactcccctgttggtctatgcgtctgtacaaacgcggcataagttgacacatggtccgctgcataaagacagtagagaaaaacacgacaaaatgtcagtttgaatatgcaagtggtcaaagctagagaatgaataaagacttatgaatataaaaaggaagaaggtaagaggtcaaaggaaggacatatggggaagaagaaggagcaacaccataaaggaaataatacagagcagatgagcagttataaaaagaaaggagcaaagaacaaaatgaaaagtttatcactgataagtcaagctgcttcctggtctttgaaagtctgggcatcctgaccctacacaatagtaatagtaacaatgacagctaacatttgttgagcacttacttgtgccaggcatccttctaaatactttacatatttcactcgctgaattgtcacaataaccctatgaagcaaatacatatcatacattttacaggtaaggaaatgcagggaagttacatattaataacttgctaaggtcatacggctactggcggaactagtagagaggttttctctcccattaagatcttaatttttctatgacacagatgtaaaattgtttttagagtcatgggggtgggggaatggacattttctttttcttattatagaaaaggtagaaaaaaatacaaaattgagaggaagaagaaaatatccttcaaattttagggctcttgacagttttaaagtttctgtcttagtttatgaacatgaaactgtagaatgtatagctttgttgataatatttttcatttggggcatataaattcaaaagtacagtacagttattttggcatttgttccaaacttttgtttcctttttaaaaatatttcaacatttattttatgttcaggagtacatgtgcaggtttgttgtataggtaaactcatgacttgggggtttagtgtacagattatttcatcacacaggtactaagcattctaaacttttcttacatttatattttgatttttgttttagaggccaactagaaattattgctgagtttggaacacctgtaggatttaatttattttgtttcttagtctttattagtttgtaagaattagcaaagataagaggataaaagcaactattatcatgaaagaaaacgatgaatgtgtatgtgaaagtctgggtttagaatgataaatgcatcagagtgagaaggaactacgggactcttctgctctcacctcccaactcacagatttccctgtgagttttcagccctgacatgtggggacccagtctgtgcttggccacttacagtgacaggagaatgactccttgccactgtaattgtaagtgtctagagggtatgacctgtgtcttatttttcactgagaatgactccctgacacagtaagtggccaagcaaagagtggtatttgaaactaaacaaaacaaatcctataggtatttcactaggaaacttagcttgctcctcagtttaaaggactcaaaggactcatcaggaaaaagagggtaaaataaaaagacacaaagtcctctagcagttattggaaactcatcttcttaatacatgaatgtcccttgtactttttaaaatgctttttaaaaaacactttcacaagttctgcagtccaaagatcagccagctatggaacagattatttttcttcaaaatatcatttccattcagacaaaaatatgtattaaaagactactatatgtcaaacactgttagatgctaaatacccaaataaaaataatacatacgtcctgttctgcagacgcgtataagtcacagaaggaaacacaagtgacaggacaacagcaggttcagaaggataagtgcagatacgtaggtatacacaagatgcgaccaaacagcacatcagggaaggcttcctggggaacagatggcttcaatgtaggcattcagaaaacagggcaaaagccacttctctcagggaagacagcctgaccgggagaagatactgagtttactgtggggctattgcacttagaagacctgaaagtcatctaaggagaaataatacatagatatttgtggattatgggtggtctcaggagaggaatttaggccatagaactgagagtcattagtggcaggtgcaggttaaataagattttccaggaagagtgccaaaaatcagaattgccgagatctcagggtataatgagagaacatgatagttaagaggtggtttaaaagatgataaggaggatccaggtaaacaggagaaaaataaggacagggtagttcatcagaaagaagtggattatagtgcaaatgttattagtaactcaagtcagaggcactgagaagaacccactgaatttgaccttctgtagaggttcctgatggccaagatgagaggatcctcagggatgtaccagagacaagtcagaagcttagctccacgtgtgaggacacaaagaaagtgtctctgggacaggatgcagactgaaggcaaggttgttttttatcagttggtttgcacttatgtttttaaggtaaatgacatgtttaaatgttaagagactgggcagggaagccctgaagagacagctgagctcattaggaatttctaccaagaatactaaaaagtatttgcatctatgaagagaagcctattgtggtgtttattataacataacattagaaataactcaggtgaccgcgaacagggcaatagatacttctggttctacccagcctgacctcctctttattctacacatcttaaataaaactgtctgaagccagtgtgcatcttgtacgttatggattctaaccttccccatcactagattttggaatgacagcatcatgcacaggcttgatgtcattctccctgatttcagctacaggaaaaaggagcattcactacggtccatctctggctgagtccttgcagctatcaaaagtctaggcctcccttgcagtcctgaatctctcagaacccgaatcacaaggctatcaagaccatgcaaccctgctgtcttgagagaggaaagcttgtgaccacccacaaagacccaggaagagccctagggtcctagaagagagggaggatacagaaacactctttgcacttcgtctcctaatgcagagtccatagctcggagttcctgtaaagcagccacaaaagatagaggctggggatcccagagagataggagggccctgatagtaggtcactgtgtgcaggaatctggggaaggcagtgtatgaccctcagagctgggtctggacttcaaacttggctcgttgatctgctgtgtaaccttggaaaacttattcatctttttgagcttcagttttttcaaaataatttctaaataaaaggaataatttctaaatgaatggaatattatcttcattgaagattcctgtgagatgtaaatggggaaagaaactatgcaggagtctcataaattctggctgttattgctgttattattatgagggccagagggaacatagactatgaggaccagatagatcaatgagcccctaaaatctgtgatccctgaagcagcaattgatgtgaaccaccccatcactcaccccgacgctcctgcgtcctcctgagcactcacccttgatggccccagctcctcggagactcagcaggaaagccaaggagagggctctcaagatcacagctctgatatggaacattctgtcttcagggcgcatgttgtggggtctataattgatgactgtgagcacaggaacagtgatgaggaactgaggccgagtggaggcagatgagactgaaactgtgggcctctagcactggaaatgggtggagaggaatcagcatggctgggattcacctatcagagaaatcatagagctgacattctctgttgctgggtaaagaggacgctggaaggtgctggggaagagatgggagaattttaggtaccagcgtggtcaagagagctccagttcacagttcattttcagagttagagaaagagatgtaaaaagataagttacaccttcttctgacggcaaatgttttccattatgttccttctcccgagccccacccccatcccagacagtcagatgatctttgatgttttttggtcactatattttaaatcatgttttatgttatgttgtcaatattttacaaaaatattctgctgataattaagaatgaatgtgctatctaataaaatatataattaatctttctttcaggtccacctccctgagatacctcctttttatttaatcatttctgcagaagtgttataatttctatttagaggttttaattaacttgaatgaagttgatctttaattgtttatctattcctggttacctttgttagtgaaatttctagataatttttatttttcagatttcttagtatttgatttttcctggtatttaaacagtgtaataacatttttatctttaaattactagtcttgttatttcattttcatataagaatacccaggacagcattacctgtggtaacaatgtgcgcccatattttgatcttgtttttaagaagggtttctctaatgtttttctgttacaggtaatgttaattttttattttatattctctttaccatatttaagaaatacttttctagtctcattttaaatatttcaattttgagctatttatttgatactcatagagaaggtcacaaaacatttactatttaatgtaatgatgaagtacatatattacgttaatattttatcttatttgtggtagccttaccttgcataaataataattactaacagattaggacatgagagattctgttattagtgctttgcatgcattacctcatttaaacctcatattaaacctgagggaggtattattaatgtctactgtaaaaataaattacctgagacatcgaggaagtatttgtctaattatctatggcaggtaaatgacaaggagaaaagtcccacccaggcagttactaaaaaaactgagtttttctccacaatcctctcctggccccttaatcctactagacaccttctactacataattattttcttctcttgcattttacatgctagccttctatttacattttaatattgatttaaagaaatgatgccaatttgattttttttgaaattagaattggtggtccaacaggatcacatttataagtgtctaaagtaagaagtaatgttctttgaaagtttgtaaaaatattcactctaaacaaaatagaatcagatgctttgaaggaggtggggtctttgatgattttttttcactttcttccttatttaccagtcaatttatattctctatggactttatttttccaaagcaatttcagacctattgatctcatttgatcttaagagctttgctataaggcaggttatatcatccccatattgaagacaaggaatcgaagtccaagagaggcagtgtcgttaaagctgcatatttacatggtagggtaggtggtgtgtccacgctcccagtgtaaggtccctagactgagccctcctgaccctgatgacagtcctgtggaagaacctggtaactcctgcacatcgcaggactcacagacctctgggagaaagtaaatatgaatgggtgctaatcttaaacacacccttggacaaaggcaagacagacagactcagacctcatttgagttctgagatgggtactctaatccctctaagtcatgccactgaatgaccttttacacactaagatagcactttttccacaacagaccatgtcctgtgggtgtgtgaggtgtggcagaattggggaaatgataatccctgtagatgggccagcagaatatttgagatcaccttcagagcaaagaaaacgcataatctccccaaacatcatgacttatctgactggttaaaatgagtatcactgtctttcctccgtcatcttaagtgcatcacaggctttatattttcagacctttcatactaactttctgcctagtgagcaatgactcatacaaagctcagtgtccattggttcttttctcagactctgtccaatcccagggtcacagaagactacttgggttcatggtctctaatatttcaaacaggagctccctttagcgagtccttcttttcctgactgcagctcttttcattttgccatccttttccagctccatgatggttctgcaggtttctgcggccccccggacagtggctctgacggcgttactgatggtgctgctcacatctgtggtccagggcagggccactccaggtaagagccgaactgccattcttggagggtctggctcagggaacaattcctaggggacgttatctttaagggatcaaattctgagacaggctgcgggggctcctgccctaaggcagtgtcctctcttcccagctagagaaagaggttcatcccctataggatagcttgctaccctactggcctattctctctccaaggacatgggtacagtaaacagagagaggtgcccagtggtcagtatgcttgtctttggggaaaatgggaccaagaggtcctggataaccttggacagacaaggtttgcagagagagaagttggcaagtgcaggctcctgggcgtgttcatgtctgcatccagcctggaggggactcaggcagagagccctaagctggagtgtccaggctctgaggatcactgaggattcagtgctcacgaagaatgcctcttattccccagggtggagcaggagcccacatcccttggacaattaaggagagaagggagggagggggataggttttagcccctgaaggcattctcattaaaggtacttctcccagcctccccagaacttggttagggtactagagtgggttgcgacttgtaggaagaatgagatgaggttgtgtgggtgcatgacagggattgagtgtaggttatcagacagccaaggaagcagtaaccaagtgaaaaatctcttcttcctgctgcctccctgtggctggtgtaatattatggcatctatgatccattgtttttctctcaggatactctcaggatatttctttttatatatatatatactttaagttctagggtacatgtgcacaacgtgcaggtttgttacatatgtatacatgtgccatgttggtgtgctgcacccattaactcgtcatttacattaggtatatttcctaatgctatccctcccccctccccccaccccacaacaggccccggtgtatgatgttccccttcctgtgtccatgtgttctcattgttcagttcccacctatgagtgagaacatgtggtctttggttttttgtccttgcaatagtttgctgtgaatgatggtttccagcttcctccatgtccctacaaaggacatgaactcatccttttttatggctgcacagtattccatggtgtatatgtgtgcattttcttaatccagtctatcactgatggacagttgggttggttccaagtctttgctattgtgaatagtgccgctataaacatatgtgtgcatgtgtctttatagcagcatgatttataatcctttgggtatatacccagtaatgggatggctgggtcaaatggtatttctagttctagatccttgaggaattgccacactgtcttgagataccatctcacaccagttaaaatggcgatcattaaaaagtcaggaaacaacaggtgctggagaggatgtggagaaataggaacacttttactctgttggtgggactgtaaactagttcaaccattgtactctcaggacatttctagtccaaatttacaccaacactctgagaggaaggactgcaaagtaggtaccttagttttccactgacttccacttttcctgcttacacccttcctcctagacctctccacacccctcctaggacacacctaaaaggtactgacatcatgtcacctcctcatctttcagggtagcaaggttggaatctcctgaatacagcccctcaagccctaaaacctcttatctattaccttgggttcattgtccaggaaggggaggagaacttgaacttgtagtcacagaagggtgctgagaactaaccagcaggacggctcagccctgggaactgcagaggggtgaggctggggagagaggaggctggagcagcactggtgacactgaacagtgtcaggaggaagtgacggatgcagcgcccccatcccataggcagagctgtcatgtgggatgagggacagtgttgggagccaccaaggaaacccagaggtgggggagcagagagcagaagggagcatgtgatgctggacagtgaaagggaggacaggcaaaggctgggttgaggtttgtagggggaatgagatgaggcagtggagccatgtgacagggactgagggtagattactggagctccctgcgtagaatgaatgttcaatcaaaatttgctggagggagagctggagccataggggagtgggtaaagtgggcagggctgattccacaattccctgcatgctcccccaactccacacacatccccaacctcaaacagggcacaagaccaaagggctgaggagccaggctatagcttaaagaggctgggggagaaaagcttggctgagacaacccatagggagctagaggtttttaatatatcctattctgaataagagacgaattcattcagatcagtggtttcaaaccgtgctctgggcaactcaattgctaagggttccacaaacaggataaagtttcttatatacaaaaaaaaatgaaggtttcaaattacaccataaaacccctcattgcttatgtctacttggcaggtaaaattccatttcaaaagttaaatgtacttaaaaaattacctaagactgggtaaattaaaaaaattaaatgttgcaaagaaaaaattcaaaattcttattcttgaatgaaaaacgttctcttactggtgattgaggaggagaaacaaagactaacaaatgaaaatgggagaatccacactcagagtggggcaactgaacaggcaggggcggatggatggcagaggaggaggaatctggaccaaggagctggggggctctgggcctggaattttagggtctggggcccaacaccaggagagaggcaggtcaggatatctgagtcaagacctgggatcttgccttagcaatgacactggagactaaaggtggactccatggtgcccttgagcccagccctaccccatctccactatcctctgccaccagctgtgcaacttctgctaggggtgaggttaataaactggagaagttaatttgtggagcatgaaacagatgagcagaacaatcacagcaccttaatttccccagtgtgcccaagaacagagcaggcctgaagatactcaaacagaaacaaacatgtgccgtgtcactgataattctgtgtagacacacacctgccagacactgctcatggcactccctaggaagaacagcatgtgggaaaggctgccaaaattgttcatgtaaaaattacatcaatgctgtcttcctcggtgctgcctatgcagctggcagccatctcttcctccacatcatggcctccctcagactcctcatgaaggataagatcctcaaaaagaggaccaacaagttcatgaggcaccaatcagactgaaatgtcaaaattaagcataactggcggaaacccagaggtcttaacagtagggttcgtagaaggtccaagggccagatcttgatgcccaacattgcttatgggagcaacaacaacaacaaaaaaaacatgctgcccagtggcttccagaagtttctggtccacagcctcaaggagctgaaagtgctgctgatgtgcaacaaatcttactgtgctgagatcgctcacaaaatttcctccagaactgcaaagtcatcatggaaagagtcacccagccggccatcagagtcaccaaccccagtaccagggtgcacagctaagaaaatgagtagaaagttcatgtccacgttttgtgtgtaaataaaaccataaaaactgccaaaaaaaattacatcaatgcctctaaacccaaaggactctacccccacaggtccctggttgttgtggtgattttcattgtgtaaaatactttccacatcttttgacaccaagtctttctgcagccatgtttgaaaattaactttcaggctacagagtctttcttataccaaagttgaagaaagttttaagaaatatatttctacatctcctacatgcaaaacaacaggagcaagttgaggaattctcaagaaactggtcgagaagagagagcgcttagctatggaaaagagaaagaaggaagggagggcttcctggaggaggtggcatttgaaccaggactgacatcaggatggaaatgtcagtcagggagttaagtagggggagcagctccgccctccacgtccccagctcctcccgcccctgttttttctcccagtgaccccacgtgaaacgtctccgcctcctccagccaccagcagaagggactgccttcccctcagtgctcgcccctccctagtgatcactcagtgcccctgagctcattcttttcagtaaattctctctctgcgtggtgagaaaacaggcctggagaggctctgcgacccgcttaggaccacagaactcggtactaggaaaactcctattttaaaatccagccctgggtgggaagatttgggaagaatcgttaatattgagagagagagggagaaagaggattagatgagagtggcgcctccgctcatgtccgccccctccccgcagagaattaccttttccagggacggcaggaatgctacgcgtttaatgggacacagcgcttcctggagagatacatctacaaccgggaggagttcgcgcgcttcgacagcgacgtgggggagttccgggcggtgacggagctggggcggcctgctgcggagtactggaacagccagaaggacatcctggaggagaagcgggcagtgccggacaggatgtgcagacacaactacgagctgggcgggcccatgaccctgcagcgccgaggtgagtgagggctttgggccggcggtcccagggcagccccgcgggcccgtgcccagggcgcaggagcagccgggttggcctaagggaccttagtgccgggcggaaaggggactttgggttggggattcatggggggagcccatctggagcttgtcaggggagcgagcgcggggacctggactgggctgagcatggagtgaggaggacgagagcagagagacccccgggagcttcatcaggcctggcagctgactgcatgtggggtgaaaaaaggaagccacaggacagcgcacaagggtatggtgtggagatggaggtggagatggcacagcaggccacacagagaagaaacctacagggaggtagctgggtttgaggtgcttgaggggcagatgggtggtctgatgggcaggtagacagaagggtctgcagccggggaggagactgagatacatgagaccatccagggagaggggacccagggggaagagcaaaggaccggatcctgggaactggacagttgtgatttggccaagacagaaaagcctgtgaaagagaccaaaaaaacccaagtgcagtgtgaggagaggcccgcagagaagagtcttggaagctgaggggaggtgacctcagcagcacagtggacagcggtgccagtgacttgggaaggtcagaaaacagaagatggaaagtgggtttggaaaccagggagacctggggagagcaggttggccgcagcggcaggagctggaatgggagggggtgcatgaggctgagtgtggcgcatcctcctcggggctgagatggattttacttgtcttgggttccccacggctgtcacagggcagtgtctcagttcattcgtctttttccttcaggaagtctgggtgtaaagggatggagagaggtgaggtgtgtgcagtaagaggatttctcaaggatgggacaggaaggccttggagctttggcttcctcctgtgaacttgtggggtggggagcctggtgcaccaacctgagggacttgagggagtagtatcaggatgtgggattgagccctggaccttttttctagaaagaggaaaaaaatgaagggaggaggaggaggaagctggggagatcacacctttgattttcttgttcctggaaagtgaaaggaagttcacctgctatgagtgagaaggtggacacactgggtggggatgaggtgagtgacatgagcttaggaaagttgctgaggtaattggttgagagaggtgttcaaataaaaataacgcaattggcaaaaactgttactaagactttgtagaggcaccaatcagtgacatggcagcattttctttcacagtaatcaactgccagattgcagacagccctgatgccagcctaaggagtgtgggtttctcctccaggcccgcaggtccccaacctcactcctctgaagactcttctggagatcctctgtgatgcacagatctccagactcagtgcccccagactcagattccctgggtggggaggtctggggatctctgcttgtaatcagctccctagaggttcccatgtagccagataagtattgtcagaacactgaagatttttgaaaaatgaaaaagagaaggttggagatgtgtcttcagaagactactaagggtgctggctagaggagggaccagaggcagggagatgaggtaggaaactgctattatttgtcagggaaattgcaatcaaggcatgagttagaacagggaaaacacagaggcaagggagaggtggaagggggaggaaagaagtagtgacaattccagggtggatgtccacccaaatctagaagtaattgagcaaatgttttctgggcattagagaaggcaactagaacaaacaggaatccttgccttggtgaaatgtatttgaactgggtcagaaatgaggccattgggtatcaggccttaactccagcgcaccctggaggtcactgatgtggctccaggctgacctgctcctgtcaaagaatattgagcaagatgcctctcgtggaatgttctgggaccttaaaacagatacccaagtattccccctgatttcatggttcccagaagctctatggggaagaaattgtaggtaattcacaactgagatttagacataagttgaatagtgtaatggacattgagttaaccgaggtaatgaagtagtgagacacaggtgcccctgaaataaactcacattgagggaagaggctgacaatgtggatcagtctgaaaacaaggcaaaaatacaatagggagtaagggttgtgtgtcagttcaagactgtacttttacctggcccagcgccatgttagggtatttgtgttctccaggaagtagaaaggaaagaactgagtgattagggacctagaagactaatttgagacattcctcttgatgagctgttctctagggtagtcctctgaaagagctgttctctagtggatctccctgaatgaactgttctctaggagcacttgacccttttctgtgtttgttttttgttttgtgtttgtgtttgtttttgagacaggttctcactttgtctcccaggctggagtgctgtggcaccatcatggctcactgcagcctcaacctcctgggctcaagtgatcctcctgcctcagcctcccatgtagctagaactacagatacacgtaccaccatgtctggctaatttatttttctttttagagatgggttctcactatgttgcccaggccggtctcaaaaccctgggctcaagtgatcctcatgcctcaacctcccaaagtgctaagattataggcatgaccaccatgcctggccttttctgctttctgaggaggaaaaaggtactggtggcagagatccaaaagaaaagttgccagtggcagtgtggaaattcacctgagaacaacaggacaagctggggcacaaatgcaaagatgcagagggaggcaacacctggtcatctgtgagaccttcatgggacctgaagacgcagcacagaggaggaacttgaaaaaggacgggatttctactactcaagcatgtaggagctcaggatattctgtaaatatgaagattttgagtttttgtaggtgaggtaaaaaaatacataggttttttacagaataagacatgtaaagctctcttcattttctttgtattttcatgaagttattagattcacaggccaccataatgccattgtctgtatatcttaatttcaagatattatttgagtaaattttgcttcctttgtatcaagatagaactttgaaaaggtaggtaatttcacagttgatcaaatattctttgcccaaattacttttggttaaaatttctcctaaatgtgctacagagtgcaaactctgtctccctgccattccgctatatacttactaactattattttattcaagatcatgcatgctctacttgaaggtctatttctatcttttcaatgctacccttacccactagcctaatcacattattcctattttcaacatctaggaatcaattacatagtgaacatgcctaagaaataataatctgggcagatgcagtggctcaggcccgtaatcccagccctttgagaggccgagcgggtggatcacttgaggtcaggcgttggtcaagtgctcctagagaaccaggctgaccaacatggagaaaccttgtctctactaataatacaaaaattagccaggtgaagtggcaggcacctataatcccagctattcgggaggctgaggaaggagaattggttgaagcccagaggtggaggttgcagtgagccaatattgcgccactgcattccagacttggcaacagagtgacactccatctcaacaaaaagaaagaatgaaagaaagaaagagcgagattatgtctcaaaaaaaaggaaggaaggaaggaaggaaggaaggaaggaaggaaggaaggaaagaaggacaatctcaaattctatttcattatttttcttccacgctcctagtccagcctagggtgaatgtttccccctccaagaaggggcccttgcagcaccacaacctgcttgtctgccacgtgacggatttctacccaggcagcattcaagtccgatggttcctgaatggacaggaggaaacagctggggtcgtgtccaccaacctgatccgtaatggagactggaccttccagatcctggtgatgctggaaatgaccccccagcagggagatgtctacacctgccaagtggagcacaccagcctggatagtcctgtcaccgtggagtggagtgagtctctgatgaccctctagaccccacctctgaagagcaggggactctctggctctggggtccactcatcttatcttctgcatctataccctggggccatgtccaaaccccatctttcttctataccagctcctgagcatagtttgaagccagggaaatggagacttcctgaccttggcttaggggttcctgaagattcatagttctcccccttgtcagagaatctagggacactgactggtctcgaaaccctcacacttaggaactgacctcacacataggaacagttctcttccttcagcattttagcctcttctcaggcattttgagaggcaacttccagaatcagcatttgccaccttgttgaggtcacacccctgttccagatatgagggtggctctttctgaatttcctcttagcaagctttttccgctgcactgtcctcatcccgatatgctgcatcaggctccagaatctcagacaggacatgagtagggatgcagctggtggaggtgacactaaacctgggtctgtccttcccagaggcacagtctgattctgcccggagtaagacattgacgggagctgggggcttcgtgctggggctcatcatctgtggagtgggcatcttcatgcacaggaggagcaagaaaggtgagaaagcctgcagggtgagcgggacttaccttcccctggcatattcacacttattccacgatgaggggtttgacagaaaagaaatgtcagaaagctctagaggccactgatatcagataatcggggaacaaacatgacctatagcgagagagggatcccaggctgggatcttaatgcagccagatgcatgaggtcccaagtactcaggctcctgcggagcgtccattgagtgatgggcaatggaatttggtgggatggaaatgtttctctaattatctgaggtggtttcaatggctgattatataacctttcgtctttcatttcagttcaacgaggatctgcataaacaggtaatattcctgctttgatttccttgtggggtgggttgcaggaggatatgagtcctttctgtgcattgtaacactgaggctcctccaggaagggaatctcaggcatgaacccctctttcaatgtcagccttcaggcaagtggggaaagagcattgcttggctccattgctgaaggaagcagagatcaactctgttatttatcagcctgagacgcatcctctcaccataatttttctctcctggacttacaggaaggaggctggcaacctgggataacttgtcttttacccccacagggttcctgagctcactgaaaagactattgtgccttaggaaaagcatttgctgtgtttcgttagcatctggctccaggacagaccttcaacttccaaattggatactgctgccaagaagttgctctgaagtcagtttctatcattctgctctttgattcaaagcactgtttctctcactgggcctccaaccatgttcccttcttcttagcaccacaaataatcaaaacccaacatgactgtttgttttcctttaaaaatatgcaccaaatcatctctcatcacttttctctgagggttttagtagacagtaggagttaataaagaagttcattttggtttaaacataggaaagaagagaaccatgaaaatggggatatgttaactattgtataatggggcctgttacacatgacactcttctgaattgactgtatttcagtgagctgcccccaaatcaagtttagtgccctcatccatttatgtctcagaccactattcttaactattcaatggtgagcagactgcaaatctgcctgataggacccatattcccacagcactaattcaacatataccttactgagagcatgttttatcattaccattaagaagttaaatgaacatcagaatttaaaatcataaatataatctaatacactttaaccattttctttgtgtgccatcacaaatactccttaaccaaatacggcttggacttttgaatgcatccaatagacgtcatttgtcgtctaagtctgcattcatccaccagcctaggcctcctgtcttaatttcatacagacagaaatgactcccactggggaaagagcaaagcaatacatgtagcactctttttcaaacactggtctttttttttttcttaacaatccaacattgttatgtgttttgcgtctcatattgacaccttttggtcaaggtagaggacatgtttgttgtaagctttctttttcgtgtagaggatggattcttcactcctgatacacacaatcagtgcacagcagctctcttatacatccagttgatgccttcagtctccctggcttcttacaagcatcttctgggccttgtgtgtccctgggcacctgtccctggtcaattcccgaaagctactgtgctcctcttgcccatctccccttgcaaataatatcttccatcgggggaccggcttcctccaatttcaggagaggtggggctgaaggcacagacttgggcgtcactggcacagatataagtaaatacagctggagtctgcagagaggctggactgagtcagggagtcaggaaagagaagccacacacaaggacaaccaatcatgtttctcataatcttcttaacctagggaataggacacaatcattttttctttttaaaacatctttatccctgatcagcctcatttcctcaaaaactataaaggaaaatgctgctgacttgtttttgcgtagtaatttcagctgtcacataataagctaaggaagacagtatatagtaaataaggaccctttatctgtcttattttcccttttggcttcacaggaaacttgtgagaaacctatgcagcataaaattaatatgatttcaatccagggattcaacgatggaaggaggtcatgagaatagcagaaagtcttcaaatcgagatcattatgaaatcctcagacccagagcacataaatcctaccctcagagtcactgagcagttaacattacaaattacaaaccatatccagtcagagtcattctctttcctgcttgtctcctgtactcatgttacaggttagggcagtaccccgagtggagtgaacaatctctggactaacacttgtcaggatcagaagctgaggtatctgcacccacattacaggaacaggatatgtgctcctagggaactgagggtgtcaggagatgaggaatgtccctggagtcacagaaagaaggtatcagatgtgtctcactctgacatatgcaggtgtttatgaaactctgggatttctaaggaaggatgcagtgcagagacaggtcccagaggagacaagagctgagagaccatccaaactgggaccaccttgtcactagacttcaaattttcaatattgatagagtgttttctaagagtcaggccctttgctgagtgctatgtgcagcaggatcaaaggcagccaggaggtagaggagtcttgaggtacatcagtcattggagttgaagagcagagattcaaaggaaagttggaactggagctttaaaggagatgtgaagtgggtgactcaacctctgactcagaaaaattgatacctgcagaagaaaaaacccggcgggcttaggactcccagctgagtgttgtatcctccatccctttccacctggtcccttcattttctacccctcacagttccctaacgagaaggtggtccacccaacagacaacgctgcctcagatggttatcaaggggtaccctaagaagaaatcatctcaccctctctttgtccccatttgtcaagtagcagtgaggccgagccaggggatggtgaaagtggaaggaggtgggagttgggcatcgggtgtgaagatgctcttgaaaggggttttaataaccacttgctaccaggccagtgaacacttaccatagttgatgccttttgagcatgttgcattgtaaactgtccctgaaattactgtgcacttggcttatgggatgaaacatcctcctagttcttttgtctctcagcttctctgaagtctcattgagcaccttctcttcaatttcttttacacagtaagaataggatcagctgtgctaaactaacaaatacccagatatccaggtttggctcatgttacacgtccaaagtaagtcatgcaggaagctctgctcatcatcgtactcaggaagccaggctgacagtctttctcctgcacatctgctcccagaacctccccagcagaatgaagggaacctaagaatttattcactggcttttaatgatccctcctagaaagaacacacttctcgcatttcattttccaatgtaaatcatatggctgcaactaacttcaaataagtgggaatacttgaaggtggaaaacatttaagaagtacacactaaataaataataaaatacttctacaagagatatttatggaggacctactgtgtaccaggagcaatgctaggcattatggatatcagcagcctttggctcctgaaaagcttacacactacctcctggcctaaggaggggcacagggatgctggcaacagtctatttcttcacccgggtactagttacatgggtgcttgcggtgataaccattcaacgtacattctattggtttgtgtgtttcttccaaatgtcccctagttcacaatagaaagggcttaaatagagaagtaaaggagaatttgggaatttgaagcaaaagcaagaagccactgaatcaagcacaaatattgagctttgataaagattggaataagaaacataataaatgagacaagaaataggacttttgcaactgaagtgtaattaataaacaaaaagccaaactgagaaactgtcccaaggacaatatgatcgagtaaacaatagaaaatgtaaaggacaagtgaagagaaatgaaggatagaaacagacatctgacatcttaataattagacgtctagaaagtcagggaaatagtggaggaagaggaaataactgaaaacataatagatgtttagtctttatagaaagatgaaataagttcattcaaaatgctgcatagaatgtcagactgttaaacaattttgttagagtaaaatgactgtaaacaaatgagctaattatgtgaattaagaggatggaaaagcagaaaaacagcaaaaagaaaatacatgtaaataataaggacaaaagctgaattcaatgaaatataaaaatagagaagataaaatcaaattttgaggcaatgaaaactttaatgagacctctggcaagactcctaaggaaaatacaggagattcagaacgaaaagggtaaatgacatttatacacattttaaaatgcaaaatcttacgaccaactctatacatataaatttgaaaatttagataaaacggatacgtttctagaaagatataaaggtcaaaactacaggaagaaatagaaaactaaaatagagtagagaatatcaaagaaattgtcatgggaagcaaagaatcgccttccaaagggccctgtcctgatcttattgcagatgagggcgtcctcccacatttccaggagcagatcatgcctcttacacgtgtgattctagaacatagaatggaacagaatttttgagatcattttatgaggttggttcatttatatttccagagccagctaagaatagtacaggagaacaggattgtggactaattttagccatgtcactgaatccaacagtacattataaaaacaatacgttttgaccaattttagatttattctaggaatgcaatgattcttcagtgtcagaaaatatataatgtggttaacacattagtggactccgcaaaattcatattaatttaaactgaattcagctcaagacatagacagaatttaatcaatttcatgacatgttaaaggtagtgaaccaaaaatctatagcatatatatttcaaagaaatgaggtggattgcctttgagattgtgcaaaagataggatgtccttcgttgctggaaatgtttaacatagcattggaagttctgaacatcactctgcgggcagaagaaaattaaggctgtgtaaaatgtaggaagacagatagtgactgcagatgaaataatctaaatactggacaagactgcagccactgcaggcccaaagcctgggtttaaatccaagctttgcactttgaagctgtgtggtcttcacctctcccggtgtctgattcctgctctgtaacatgaaataaataagaaccaacctccagatgtaaataagtgaacacatgagaagcacttagaatagtgcctagaacatagtaagcaactcaatgaatgtcatttctcattacatttgttaatgtttttatccagcccaatggcagtaaaacatcaatgctcaaagagcccctggtgaagtgtttctctttcccactcttcacccctaacttgttacctcgtcttttccactctgtccctaatacacctataggatgactcataggagcccctggacccggggatgctgtcagatcgcttggtctttgagacaatggtgccattaaggacccccgccaggcccaccagcaggccgagggcacagaccagcatctccatggtctcaggcacctggattatttcatggacctctggggcaccaagggaagacagagttataaggtacagagagcaggggctggccttggatgtgggaggtgttgggtattcgaaaccatgagatggtgaaatttggataaagtgaccataaaacatgggattgaggaaggcaggtgctgaggggcgatgggcccaggaaataaaggtggtgccaaggccgtgagggcagagggagggcgctccataccccagtgcctgaggagaggctggtgcaggccccagtgctccccctggaggtcacaggtgtcctcggccatgggaacgagggtcagatagtggaacctgtgtaatctgagtttcttgctgggcaggaagatggtctctgcaataccctcaatgactggctccccattgcgcagccacgtgatgttcagcactggtgggaagaacttgtcaacatggcagacgagggtgttgggctggcccagatccacaggctccttgggaaagacgcttacctcggtgggggctccaaaaggggatagaacccaaggagcctactgccattggctgattcttaaaggttccaccaccccaagtcctatattcaccagattaggggccacctctcccaggcccatcctcctgctcccctagggctcctggacagggtcacagcttctcgtgctcctgacctggccccctcagcccagcctttctcttgagtaagaagaaaatgcctcctcctctgctgtcctaagaacccagctgtgtggacccaagatttctcgctctcagggaaggggctcattcatgagtgggcatcatggcctctagttctatgtgtggcagagaggccctcccatccctccagctggactctagaggaacaggcagctataggcagtgccatttgtggcccaagtctgtttggaccattgatccgggtgttcaagtgcttccttgccatgacgatgccagcaatacccctctgagaggaacaggcagctataggcagtgccatttgtggcccaagtctgtttggaccattgatccgggtgttcaagtgcttccttgccatgacgatgccagcaatacccctctgagcaccaaagtcaaaggtgtgaataaactctggtagaggccagaccatctccttctcatccaggttcacgtagaactgctcctcctcatcaaattcaaacatatactccccagagggtctgtgcgtctgcacaaactccgcatatgttgacacatggtctgctgcatgaaggagaagatggagaatgggtgaatacgtaggatgctacacagaatgcaggaagcaaacaggtaacaggaaggttattgggaacatgaaggaataacacagaaaatgagaaatgcaaatgaaagaaaagaaaaggagtgagaagaaacaaagacagaaatgacccatggacgatacaggttgtttcccttgtccctgaagacttaacatccgtctatgataatggtaatgctgaatacagtaagataatatttattgggcacttactatgtgctaaacttactcattgaatcttcacacccccatgtagaagaacttattttccatagtagggaactgaccccagaggtaaagtaacttgtccaagtcacacaactcctggtagaaacaatattgagtagtcctcctacctcattcctgtaggatctcagaaaccctacaggacaatacattaaaaattactgatatagccataaagcaaggcagggaagtggaaggatggaataaatatttcagagtggaacaaaatcgtgaaggacatgaaaatacctccagagtcttagtgacatttatagacttcaagttacattcttacttttagaagaaaaatgataccttctataattttatccacaacacttacattttaggcagagtaaatttaaaagtattatcattcacataacattcacaaaattgtcttgtggagtgtagttttcaagtgtagtttcacctggaaatacaagttgttggcatttgaaagacctatgggatagtatcttagctttacctgatacataagaagcagcaactggttgataacaaaaagtgaattattattacagtgaattacagagagtttagggttcggcctggaagaggaagtgaagccaaatgacactgcatggttggtggtccctaagtgaggatttcccctcccagcccagcatggggagaaccagtcctctacttagatgcatagtgtgacagcaggttcagtgccgcacatggatggtgagggtcccccactgagtttagggtctagaggattactcacctacagaaatgaatcccaaaggaaaaagaaaaatacacggtgtatagactgggctacacagatgtaattggttcagcttaggttactttgtatttattatatttacaaaatctgaaaactaaaggttggcacattttgaagcaaattccacacttcaaatgttaattttcattcagttaataaatgctttttgtgaactttcactctctaggtaataaggatgaaactctaaagatgggaactttgtccttaatctacttgaaattcaagaataaaacagacaaagaaaagatgattgctacatgtgtggtttgatcaccactgagtatcacaaggtatacacaagagctactcaggagcaaaattaaaatacgatttaggaaaggttcctagggacagtgttcacctgcagatagcaaaacagagaaaggggaaatggcatttccagcaggagaagcaggctcaggagcagagaggcatgaagttgcaaggagaactgcagttcttcagtgtgactgaagccaggggagatgtgggccaggcagcactgtaacctgccttgtgtgctgatggcaagtgtttgcattttatcccacaggacataggaagttgtgaagtatcttaagcaggagagtaacacggtcagatttgtgtttggatggggcacctgtaggaaggatgggctggaggaggcgggactcaaggcaagaccagtagcacttttaagcctctggtgggaagtaatgaaggcgtaggccagggcaggaacatggggtgaggaggacagcagatggatttgatggcagtaatgacatgagaggccacaggaatcactaaatcacatgccagaagtagggatatgaagaagtcgagaataaccacgcaacgtggagaattgtggcatccgtgcctgcaaaggtgataattaagtgattgagagaaggtaaaattttctgtttgagacatactgaatttaaacttctaggggaaaacatacagttgatttgaaggcagtgaaataaatggatgagtgtcatgctacattaggttagtgacataaactggaaggaggctcatggtgggtgaagttctaattttgggtcaggtcactcaagaaaagtacacaaagtcaggatagcagggatctgagtgtgtgctcctgcatccagacaaacacagacatgaagaaagaggctgaaaagcagaggactagaaattggtaggaaaacagagaggaagtgggttcataaaagacaagagacaggagaaaacttccaggaaagaggagagggggcatctcaaacacactaatgacacacataagacagaaacagaacagtgaccactggcttgagttgtataaaagtcattagttgccaccctgagaggagcatcagagatgagggaaagaaaaagagagagtacattgggttgaggactgaatgaaatgggagaaaatcgataataggctgggcacagtggcccatacctgtaatctcagtgatttgagaggccgagacaggaggatcacttgaggccaggagtttgaaagcagcctaggaaacatagtgagagtccatctctaagaaaacaattttggattccctgccttccatgagcaacacagcaaacataagctctgcagatgtgctcagacttgagcctgactcactgaagagagtgtggtgctgccaggcctcagacaccagattataatcaacctcttcccaggccctgcacaggagaggcccactctgtggggcatacagtgcccaggggtggtacaggccctgcagagaccacagactgttcacctgacaagaaatatcttgaggaactcacttcacagatccctcaagaaaggaaccactgcaggagaatacccagaaaatcgaaagaattcacagatccttttaaagaagggaggggccactgcaaactccaccagacaagtgaaaaactgtgcgttcccaaagcgtgagaggggaaaaacctgcctccggacccatgtccccactggggaactcgaaaatccagattacaggaaaaggatttaactttacctagacctgaaacagatttagcatgaaatacaaaagtacgccgggcgctgccgctcacacctgtaatcccggcactttgggaggccgaggcgggcggattacaaggtcaggagattgagaccatcctggctaacacgatgaaaccccgtctctactaaaaatacaaaacaattagccaggcgtggtggcgggcgcctgtagtgccagctactaggaaggctgaggcaggagaatggcataaacccggaaggcggagcctgcagtgaaccgagatcgcgccactgcactccagcctgggtgacagagtgagactccgtcgcaacaaaaagaaaaaaaatatatatatatatggtagatgcagcagtgagaagagccttgtaggcacgcccagtctttagctcaagcccagggaagccacccctgactatatctcacaagggccctgggggaaggcagacggcaaaatttggaaggggtcacagtgtgaaaggagcgtccaactgaaatttgttataattctgactgggcacaaatcctctggagcagaatctggggacgaacggaactgctggagaaagagcagaagttactgccaacattgtgggcagacagggaggcacatggcctgaaagctgtgcttgctttctcagcaggaaacttatagcctggagtgaggtctgagtccatcctgaaggctgcagggagataaattcaatgctgttagtgtggcacagcaggagcaaaacctgcctcgccaactgcatgggagctgggtgaagcctattgctaccaggtttcccctacttctctggtgacagaggcagccataatgccctctggaacataattccattggctggagaaaaaccctccaccccatccctcacagtggctgccgcaagccccccgcccgaggagagtctgagctcagacctgcctaaccctgtccacacctgagggcatttctctacccacctggtagccaatcacaaaagacgtaaactcttgggagctttatgacaccactcattgcctgagaaactgaatatttatcttggccaacttagggcaagcttatatccaccttctactattgtagctggtgccctcttgaaagcaccacatcctggctggaggccaaccaactcaggacattacaacaattcacgacagaataactgctctaagaaaggagaaaacagctaattccactggctgaaaaatcttgactaaccagtggtcttcggtctgttcacatgacaactgcactgctagcataaccagcatttgagaaagccaccacactaagtctatctacaaccaaggattctcacagagtctacttcactcccctaccacctccacactggaccccagcaatagatccaaactaagaagaaatctctgaattgctagatagagaattcagaaggttgattttaagctactcaaaaagataccagagaaaggtgaaaaacaacttaaataaattttttaaaaacacaggatatggattaaaaatgccccagggacgtagatatcataaagaagaaacaatccaacttctggaaatgaaagacacacttagagaaatacaaaatgcactggaaagtttcaacaataggatccaacaagtagaagaaagaacttcatagctcaaacaacaagcctttcgaattaacccagtcagacaaagacaaagaaaaaagaactttaataaataaacaaagcctccaagaaatttgggattatgttaaatgacctaagaatgattggcattcttgaggaagaacaaaaatctaaaagtttggaaaacatatttgagggaataatcaaggaaaacttccctggcctcgctagagatctacacaaccaaatacaagaagctcaaagaccacctgggaaatttatcacagaaagattatcgcccaggcacatagtcatcaggttatctaaagtcaggacaaaggaaagaatcttaagagctgtgaggcaaaagcatcaggtaacctataaaggaaaacctatcagattaacagcagcctataagccagaaaagactggggtcttatctttagcctcctcaaacaaaataatttccaggcaagaattttgtatccagcaaaactaagcgtcataaatgaaggagagataaagtctttttcagacaaacaaatgctgagagacttcaccgctaccaatccagcactacacaaaatgctaaaaggagttctaagtcttcaaacaaaactccaaaatacaccaaaatagaacctccttaaagcataaatctcacagggcctataaaacagtaatgcaaaggaaaaaaataaggaattcaggcaacaactagcatgagaaatagaacagtacttcacatctcaatattaacactctccacttaaaagatacagaatggcaggaaggataaaaattcagcaaccaagtatcttcagtcttcaagagtcatctaatgtgtaaggactcacaaaaacttaaggtaaaggagtggaaaaagatattccatacaaatggaaaacaaaagcaagcaggagtagctattcttatatcagtcaaaacagattttaaagcaacaacagttaaaaaagacaaagagggacattatacaatgataaaaggataactccaacaggaaaatatcacaatcctaaacatatatgcacctaacatgggagcttccaaatttataaaacaattattactagacatgagaaatgagatagacagcaacacaataatagtggggacttcaatactccactgacagtactagaaagtcatcaagacagaaagtcaacaatgagacaatggacttaagttacactagaagaaataaacttaacagatatttacagaacattctactcaacaactgtagaatatacattcttctcatcagcacatgaaacatcctccaagatagaccacataataggccacaaaacaagcctcaacaaatttaaggtaatcaaaattatatcaagtcccctctcagaccacagtggaataaaattggaaattaactccaaaagaaaccttcaaaactatacaaatacatggaaattaaataatttgctcctgaatgatctttgggtcaacagtgaaatcaagatgcaaaattctctgaactgaatgataatagtgacacaacttgtgaaaaccactcggacacagtaaaaacagtcctaagaggaaagttcatagcattaaatgcctatatcaaaaagtctgaaagagcacaaatacaaaatgtaaagtcacacctcaaggaactagagaaacaagaacaaaccaaacccaaacccagcagaagaaaagaaataacaaagagagcagaagtaaatgaaattgaaacaaaaaaatacaaaagataaatgaaacatgaagctgattctttgaaacgatacataaaattgatagaccattagtgagattaaccaagaaaagagaggatccaaataacctcaattagaaacaaaatggaagaaaatgccactgatattacagaaatataaaatatcattcaaggctaatatgaacacattcacaggcacaaactagaaaacctagagaagacagattcctggaaatatacaaccctcctagaataaatcaggaagaaatagaaactgtgaacagaccaataaaaagcagaaagattgaaatggtaatttttaaaaaactgccaacgataaaaaatcacagattcacatggactcacagctgaattcaatcagacattcaaagaagagaattggtaccaatcctactgaaactattccaaaacagagaaggagagaatcctccctaaattattctatgaagccaggatcgccctaataccaaaaccaggaaaggacataataaaaaagaaaactacagaccaatatctctgatgaaaatagatgcaaaaatcctcaacaaaatacaagctaacataatccaacagcatatcaaaaagatcatacatggtgataaattgggtttcatgccagggatgcaaggatgatttaatacacacaagtcaataaatgtgatagatcacataaacagatttgaaaacaaaaatcatatgatctcaatagatgcagaaaaagcatttgacaaaatccatcatcgcttttttattaaaaccctcagcaaacttgacatacaaagatcataacttaaggtaataaaaaccatctatgacaaacccacagccgaccttatactgaacggggaaaagttcaaagcataccccctgagaactggaacaagataaggatgcccactctcaccacttctattcaacatagtactggaaatcctagccagagcaatcagacaaatcagtaaataggaagtcaaactgtcactgttcaccaatgatatgactgtatacctagaaaaccataaatacttatccaaaaagctcctagatctgataaatgaattcagtaaagtttcaggatacaaaatcaatgtacacaaatctgtagcactgccatatactaacagtgaccaagctgagaattaaatcaagaactcaaccccttttatagtagctgcaaaaaaataaaatacttaggaatatacctaaccaaggaggtttactgggggaaccagcccccaatatttcaaagtatgttcttttctattttccctaagtgtgggccagtctgagaaataaagagaaagagtacaaaagagagaaatttacagctgggtctccgggggtgatatcacatgtcagcaggttccatgatgcccacctgagccgcaaaaccagcaagtttttattacggatttcaaaaggggtgggggtctatgaatagggaatgggtcacagggatcacatgcttcagagggcagtaaaagatcacaaggcagagggcaaaactagaatcactgatgaggttccacatcccgctgggcacacattgtcattgataaacatcttaacaggaaacagggttcgagagcagagaaccagtatgactagaatttgccaggctggaatttcctaatcctagcaagcctgagggcactgcaggagaccagggcatatttcatcccttatcttcaaccatgtaattcagacactcccagagtggccattttagagacctcccccgggaatgcattcttttcccagggctattccttgctgacaaaagaattcagcgatatttctcctatttgcttttgcaagaagagaaatatgactctgttctgcctggccctgcaggcagtcagaccttatggttatctcccttgttccctgaaaattgctgttatcctgttcttttcaaggtgcccagttttcatattgttcaaacacacatgctttacaaacaatttatgcagttaacgcaatcatcacagggtcctgaggtgacatacatcttcagcttacaaagatgacaggattaagagattaaagtaaagacaggcataggaagttataagagtattgattggggaagtgataaatgtccatgaaatcttcacaatttatgttattccactgtggcttcagccggtccctccattcagggtccctgacttcccgcaatagaggttaaacacctgtacgaggaaaattaaaaacactgccgaaagaaattatagatgacactaacaagtagaaccacgtcccatgctcatggaagggtagaatcaacattgtgaaaatgaccatactgccaaaagcaatctacaaattcaatgcaatccccatcaaaatgccatcatcattctttacagaactagaaaaaaacaatcctaaaattcatatggaactacaaaagagcccacatagccaaagtaagattaagcaaaacgaataaatctggagcatcacattacctgacttcaaaatatactgcaaggctatagtcaccaaaacagcatgggaatggtataaaaacaggcacatagacaaattgaacagaatagaagtcccagaaataaaaccaaatacttacagccaactgatcaaacaaaaacataaagtggggaaaggacagcgtattcaacagatggtactggggaaattggcagtccacatgcagaagaattaaactggatcctcatctctcaccttatacaaaaatcaactcaaggtagatcaaagacttaaatctaagacctgaaaccataaaaattctagaacattggaaaaactcttctagacattggcataggcaaagagttcatgaccaagaacccaaaagcaaatgcaaaagaaacaagataaatagatgggacctaattaaactaaaaagtttcttcaaaggaaaagaaataatcatcagagtaaacagcccacagagtgggagaaaatattcgcaagctatacatacaaaaaaggactaatatccagaatctacaaaaaactcaaacaaatcagcaagaaataaacaaatactcccatcaaaaagtgggctaagcagaggaacagacaattctcaaaagaaaatatacaaatggttgacaaacatatgaaaaaatgctctacatcactaattatcagggaaatgcaaatcaaaaccactatgtgataccaacttactcctgtaacaatggtcataatttaaaaataaaaaaaaaatagacgttggggtaggtgtgatgaaaagagaacacttctatgctactggtgggaaattaaactagtacaacctatggaaaacagtacagcgatgccttaaagaactagaaatagatctaccatttgatccagcaatcccactactggaggaaaaaagccattgtatgaaaaagacacttgcacacacatgtttacagcaccatgattcacaattgcaaaaatatggaaccaccccaaatgcccatcagttaatgggtgaatgaagaaaatgtgatatatatatatgtgatatatatatatgtgatctatatatatatagatcacatatatatatatatgatctatatatagatcacatatgatatatatgtgatctatataccttagaatactactcagccataagaaagaatgaaataacatttgcagcaacctagggggaattagaaaccattattttaagggaagtaactcaagaatggaaaaccaaatattgtatgttctcacttataagtgggagctaagctatgaagacacaaaggcataagaattatataatggactttgaggacttccaggtatgagtaggagctgggtaagggataaaagactacacactggatacagtgtacattcctcaggtgatgggtgcaccaaaacctcagaaatcaccactaaagaacttatccatataaccaaacaccacctgctccccaaaaactattgaattaatttttcgaaatgattttttaaaaaacttttattggaaggaccctccggagttctgaggaggaggcctgagcatatgtggggaaggcacagatgaacacataggagggatctctaagaaaacaatggccaccaggtcactgctagactcaccacagggccttctaaaccagggggcccctccacgagcataccctgtggagtcaaaggttaaaactcacaggtgacagggccagcacactaaaccccacttgcttctcctctttccaccacctcagccctgtgaccagcatgacttacaggttccagcactgcaggctctctcttctctcccttcagcccccggggcccatgggcagcctaagggagacacacatgtaaccccagtggggcccatgagcagccaggacaccaggcctgcccccatctcaactccaacctcgattttgggtcctctggagaccagaccagccctacccacaagccccacaggcttcctctaaatacttctgttcacaaaactctcatgcctgccaaggagatctcagggttccctgcaccccagttctcagtcccacctcagcaaacacaacctctccaaatcctgaagagcctctttcagaaagaggactttgagtctttcagtctttctccaaaaaagaaaaggtatatgcccttatgcacaaaattttatttagaatttgaaggagttcaaaaatgtaaaaaccctgcacaggttaagtatccatactccaagtaaatttggagagcatttcccagagatattccaaactcaggcctcataactgccttttgcaaaacatacagttcttgggctcagttatccaagccccagagcagccccctacaatgcaccccacagttcctctcccagcaggatgctttgcccttcttctggccctcatgtacactccaagccaaccagttccctcccttgcacacctccattcagatgcctgttcccaaatccaggccatagccaagataagggtggggagaaggtgaaacattcaccaccaccccaactccccaaaacaaagatcttcagaatgcccctctccaccttcatcctgacagcaatgatccgtttcaaaattctcccagatcccacatcaaccccaaagacccagacagcagcataaaggaaaggcagcagaagctcacgggtgccaagagcaggaggtgtgggatgcagcagcagggtagaaaaggcagccataactgcaaggcaggcagaagatgtagcagagtagacaggaagcagtccaactgacagagaatactggaagatatgagaacaactaagggacacaaaataaaatgacaaacacttggatgcaagagtgatgccagggccaaggaaaattaaacatggccaagatggccacaaaacaaactggacaaacaggaagtggctgtacagacaggaagcagccaagaaaagaggatctgggaagtgaaccttcaacaatatggctaccatgacccagagtgaaaagaaaggcacaaaacaggtacaatgggactcctgcagagggaattatgcatgcaaggcttagtgggtagatgagcgggaggtacagagtagatggaatcagatgagtgaatagatagatgggtggaattgaatacatggttgagtgaacggttggatgtgaagtgagtgggtgaggagatgggtgcatgagtgtattgaaggagagagtggttgagttccaggaaggataatggatagatgggtggctgaacagatgcatgcatccttgtatgcatgggtagatggggtgtgtgagtgggtgggtgagtgaatagatggatggataagttgaagaggacagatgaacaaaagcatagtcgaatagatgtgtgtaaagaaggggagagtcattaagcagggggaggatggacaggtgagtggatataagccttcatgcatgagtagatgggtaagtttgtgatgcataggtgggtaaatggttgcgggagtgggtggtggatgtgtgcgtaggtggactggtgaatgagtggatggatggggtggatgaggagagagataggttcaagggatggatagatggagagatgaagactgaaggatagaataagtggctgtggacagtcctgccacataagtggacatctagttattctgcagagatcagcagtcctgaagataggaaatgcaaatcaaaattcacaagaaaaaaaatgaaggcttaggaaataggaacattgcatactggggccagaagaggagtgggcacaaaataagggaccagaagtcactcctttctctgatttttgtggtaacctcaaagactttcttcatctgggatacaggcaccaacaattatcaccccacaggtgtccaacactggactagttcttcaggggagaggccgggtgactcacatcttgcagtcaacaatgagggtgacagactggcccttcatggccatagccacaaggtgccacctggtcatggagtgagaggttcaagtgactgactgaagcaggggcgtcaacagggttggagatctgttgatgaaagttgaaaccaatgacgatgagagcagtaatcacaatagctgccatttatcaagtgcttacagtgcaacaaacactgtgccatcactttctcacttgtttgtgccaattctatttactgtccatcctaagatgtagaaactgaggctcaaaaaatttaagtaacttgcccaaggtacaggctaacacaacttgcagagaaggatgcactctaagcccaaactctgggctagaagtgactgaactttgggcagtgcgtaggtgtgttgtggccaaaagaaggaacagggtttcacagtttagagcgtacaggttctagggcactttctcacaaaagtgtgggccaggcagaccagaggagcaaatagacttacttgccaactactagggtgaggcctcagaagacgggctaagcaggttgaagtcgtccagtctgatcctcatacaggaagctgacaagttggcctggctccaggctcaactgttggacacctgggcactgcagagaatcaggaggggagcttggagaccaggacgggtccagaaaacagtcaggagaaagaaatctttaggaaatcctcctggtacccgagagaaatacacacagagtgagaggcaaagagagccaccacccctttcctcctggtgtctgattccagaccccaccccattacctccctcaccgtgtcactacacttaggaagaggtagagggtgggtgtgctgagttgggcagtttatgacactcagtagatagacagataccccttgccctccagacaccatcagggaagtaggggaaactcaggcccaggagcaaatccacagggggtgcacctgggagagtccatgagggtcaggggaagggacacgccctcaggagggaataaatgggggactttgtctcagaagggagtgcaacttgcacttgtggtcacagagggctgctaagaactcctcaacaggacagttcagttatgggaactgggaaggggtaagactaggaagagaggaggctggagaagtgtgtgatgtcgctgaacagtgtgcagcaggagggaaggggtgcagatgagaagagaacttgaagggtcagcaattccatcagcctttggggtagagagcacatgaattgagaaagaaagctgagatatagcttgtaaaacagctggaattcagatctctcctaagtcctcttcctttcacatattttgtcacctgcctcgagacacacacagttactgtcatccctgggttcagtactgtaagcccagacccatcttccctgctccctttatacctgatcctcctatttctctgccctgtttaggtcccaggcagaagctaggtggtcatctctgtgccctctctggtcctccaggtgaacagaacttagcattcaaggagttccctaaagtcaattaatttcacccccaaaccccagctgactttgagggcatccgcatgcatcatgtcgccaacatatcctgacaaggggaagggccacatttctgaagccagagaagaagctcaattctggaatgatggggatgaaggagaaataattgctcacattatgtaaaactgctctctgaaaggatttcaaaaccaaggtaagatttctgaaatgacttctgttgaacttctgactccactctacttcctccttcctggaaatctttacctccttggcttatgtgccagtatattctactaattcttctgcctctctgcttctccattttctttgaatagttctcttttgacattttgttcattatatattttccattaatttagatttcttaagatatttcattaaaatatgattgacttttattactgagttcttttggtatcctcctaaattttgcacctaaggtaagtgcatccctagtcccagcctggctttccacactgtctcttaatatctaacattctctatttatttcattcatttcatgtaaataattgtaaatccttatagatagaattataaatgtgtgtaaacaatgaaaaattgaaaacagagagaatatatcctatgtcctactggatattaacatatactacaatgtcatagtaaaaaaatagtatcaaaagcctactatatgtcgaacattgttagatgctaaatattcaaataaaagtaagacataggtcttgtcctcctgatgtttacagttcacagaagagaacacaagtgacaagacaacagcaggcccagatggataagtgcagatatggggcaggcacaagatgctgctgtcaaggcatcagggaaggcttcctggggaacagatggcttcaatgtaggcagtccgaaaacagggcagaagccacttctcacacaggaggaagcaggttcaaaagtgtgggcccagtgtggcaatgacatatctgaagaacttcagctgcttcagtatgaatggagccagctttggatgtggaacagcagcaagaaaaaaggaaaaatagacaggcaggggctggatcatgacagatgttacatgcaaagctcaggagtggctactctgtcctggaagtcataaggaatcattgaaggattttaagcaggagagtgatggcgcatttgcaatttaggaagatcactacggcaacagtgggcagcatgagtgaaagaagttggttcaagaggcaagactaatagtgcctgaacaaagagtgaggaaatgggcataggagtaaaatgatggaagaagaggacttaatttgattgacattaaagggattattggtgagtgatgtcggtggcatccgacttagaaaactcccagataactcttattcctagactggccaatgcaatcatctcttttgtgtgtgtgtgtgtaagtgtgtgtcacttttctaaattattttgattgacaaaaattatttatatttatcatgtataatatgttgttttgaaatgtatgtacatcatggaccggctacatcaagctaaagaacttatggctcacctcacatacttattttttgtggtgagaacacttaaaatccacccttttagcaattttcaacaatacattgttagcaactatagtccatgttatacaataaaactcttaaaattattcctccaatctaaatgaaatgtatcttttgaaatgtatcctaaatgaaatgaaatggatgtatcctttgaccaacatctccccaacccaatgcaaacatcttgattccattcattaaaaagggtaatgagagaagacagcctgactgagagaagagactgagttcagtgtggggctattgcacttagaatatctaaaagttatctaaggaaaaataatatgtaaacatttttgtatgatgggtggtctcagtagaggagtttaagccagagaactgagagtcatcaagcataggtgcaggttagatgagcttttccaggaagagtgccaaaaatcagaaatgcagggatctcagggtatgatgagagaacataataattaagaggagatttcaaaggatgataaggaggattcagtaaataggagaaaaataaggacagagtagctcattagaaagaagtggattatggtgcaaatattatcagtaactcaagtcagaggcactgacaagaacccactggatttgaccttctacagaggtttctgatggccgtgatgagaggatcctcaggggtgtactggagacaaaagtcagaagcttagctccaagtgtgaggacacagagagagtgtctctagggtaggatgcagactgaaggcaaggttgttttttattagttggttcatggttatgttgcttttttcccccgtaggttatagtggtacaggtagtatttggttacatgagtaagttctttagtgatgatttgtgagattttggtgcacctatcacctgagcagtatcccttgccccctcccacctttcctctcaggtccccaaagtccattgtatcattcttatgccttttcatcctcttagcttagctcccacatatcagtgagaatatatgtttagttttccattcctgagttagttcacttagaataatggtctccaatctcatccaggtcgctgcaaatgccattaactcattcctttttacggctgagtagtattccatcatatatatatcacagtttctttacccactcgttgattgatgggcatttgggttggttccatgatttgtgattgtgaattgtgctgctataaacacgtatgtgcaaatatctttttcatataatgacttattttcctctgggtagatgcccagtagtgggattgttggatcaaattatagttccacttttagttctttaaggaatctcctcactgttttccacagtggctgtactagtttacattcccaccagcagggtagaagagttccctgatcaccacatccacaccaatatctactgtttttttatttttttatcatggccattcttgcaggagtaaggtggtatcacattgtggttttgatttgcatttccctgatcattagtgatgttgagcattttcttatgtttcttggccatttgtatatcttcttttgagaattgtctatgcatgtccttagcccactttttgatggggttgtttgttttttcttactgatttgcctgtgttcattgtagattctggatattagtcctttgtcagatgtatagattgtgactactctgtgggttgtctgtttattctgctgatggttccttttgccgtgcaaaagctctttagtttaattaagtctcaactatttatctttgtttttattgaatttgcttttgggttcttggccatgaaatccctgcctaagccaatgtctagaagggtttttccaatgtgatcttctagagcttttatagtctcaggtctcaggtttaagtccttaatccatcttgagttgatttttgtataaggtgagagatgaggacccggtttcattctcctacatgtggatagccaattatcccagcaccatttgttgaaaagggtgtctttccccaccatatgtttttgttcgctttgtcgaagatcagttggctgtaagtatttgggtttatccctgggttctctattctgttccctttgtctatgtgcctatttttataccagtaccatgctgtcttggtgactatggcagggaacgtgagctttttccccgcaatcctatactggccccttctactgcataattattttcttctcttgaattttacatgctagtcttctatttacattttaacatttatataaacaaatgatgccacttttacattttctttattagattaggaggtcgtacaggatcacatttataggtctttaaattaaggagtaatattctttgaaagtttatgaaactattcagtataaacaccacagaatcagatgttttggaaaatgtagggtcttttatgacattttttcatttcttcctcattcactgtataatttttagtctcatttttccaaagcaattacagatccgttgatctaatttgaccttaagagccctgctgtaaaggcaggtcatatcatccccatactgaagacaaagaactgaagtccaagacaggcagtgtccttcaagctgcatacttccatggtagtgtaggtggtgtgtccatgctcccaggtgtaaggcccctagactgagccctgctgaccctgatgacagtcctatggaaggagccagtatcccccgcacatctcaggactcacagacatgtgggaggaagaaaatatgaatgtgcactaatctgaagcacggccttgaacaaaggcaaaacagactccaggcctcattttcagttctgggatggatactctaatctctctaaatcatgccactgaatgaccttttacacattgagatagcatttcttccacaccaggccatgtcctgtgggtgtgtgaggtgtggcagaattggggaaatgataatccctgtaggtgggccagcagaatatctgagatcaccttcagagcaaagaaaacacatcatctccccaaaactcatgactctgactggttaaaatgagtgtcagtgttctccatctgtcctcgtaacagcatcactggctctatattgtcagatctttaatactaactttctgcccagtgagcaatgactcatacaaagctcagtgcccattggttcttttctcagagtctgtccaatcctagggtcacagaagactgcttgggttcatggtctctaatatttcagacaggagctccctttaatgagttcttgttttcctgactgcagctctcttcattctgccaaccttttccaactccatgatgatcctgcaggtttcagggggcccctggacagtggctctgacagcattactgatggtgctgctcatatctgtggtccagagcagggccactccaggtaagagcagagctgctattcctggagggtctggctcagggaacaattcctaggggactttctctttatggaaccagactctgagacagcatgtggggctcctgccacggcctagtgtccttctatcacagctggagaatcaaactcacctcctataggataggttgctatccaccaggtctattctctctccaggaacatggacacagtaaataaggggaggtgctcaggggtcaagttgcttgtctatggggaaatggggccaagaggttcaggataaccttggacagacaaggtttcagagagagaggttggcaagtgcagactcctgggtgtgctcacatctgcatccaaccttgaggggactcaggcagagagcccttagctggtgtgtccagactacaagtatcactgaggattcagtgctcacagagaatgcctctcattctccagggtggagcaggagccaatgctccctggacaatgaaggcaagatgggagggagggggacaggttcgagcccctaaaggcactcttgttgaaggtatttctcccagcctccccagaacttggttagagtattaggatgggttgaaacctgtcagaagaatgagataaggatgtgtgagtacgtgaaagagattgagtgtaggttatcagacagccaagaaagcagtaaccaagggaaaaacctctgtctcctgctgtctccttgtggctggtgtaatattatggcttctatgacccattgtttttctctcaggatgttcttacttttctggtccaaatttacaccaacaccctgagaggaaggactgcagagtaggtgtcttagttttccactgacttccacctttctgcatagaccctccctctgagacccttccacatccacctaggacacccctagaaagtgctgttctcatgtcacctcctcattttccagggtaacagtattcgaatctcctgaggacagcccctcaaaccccaaagcccctcacctattacctcaggttcattgtccgggaaagggtggacaaactgcacttgtagtcacaggggtgctgagaactaaccagcagaatggctcagccctgggaactggagaggggtgaggttggggagagaggaggctggagcagcgctggtgacactgaacagtgtccagcaggaggtccatagcaacagtgtccataggcagagttgtttgtaggatgaggggtggtgttgggaaacgccatggaaaccctcaaggtgcggggtagcagaaagcacaggagggagcgtgatgatggtgggcagtgaacaggtggacgggcaaagactgggttgaggttggtaggggaaatgagatgaggcagtggagccatgtgacaggaaccgagggtgggttaccagagctccccgtgtagaatgaatgtccaatcaaaacctgctggagggagagctggagccataggggagtgggtagagtgggcagggccaattccacaattccctgcatgctcttccaactccacacacatctccatcctcagagcacaagaggaaaggcacaaggagccaggctgtggcttaaagtgagagaggggagggtggagaaaagcttggctgagacaacacctagggagcaggagatgacacggcaggtgaaaaaaccagactcctggaggcaacacccttttgtctctgacaagctttaaaatgggctttttacagctgagtttcttacctcaccccacccactaccccaagcattagggccacactcccgagtcctcctgtcacaccagctgggcacttgcagaagctcattgtgcatttgagtctttgggtactcactcttctgttaatctaactcctcaaataaaatccctagcacaaaagagaggggggaagatccagtcagcaaacagccaacaaacacttttcaaccattaagatctggtgcccatggaaagtcttcttgaggttttccagtagctcataagctgatccagttcctctttcatatgcatttatttagaattttgctcctattcaaacaggtcacacagtgaaaagaggaagggaactaagatagattgagcagtaacagatacaatactatgtatttgacatatgtgagctcatttggttctcacagcagttttgcaaggtaaatagtattattactattttgcctttcaagaaatggagagttagaaggttgtttcttgtccaagataacttagtaatcagtcgtagtgcaagaactggaatccctacctgtgacatgttccttttcttacccatatggactccattatatctttctgcaattatattttaatataacctattctgagtgagagatgaattcactcagatcattggttttcaaattgtgctctgggtaactcaattgtcaaagattccgcaaacaggataaagttttccatatacaaaaaaaaaatgaagtttcaaattccaccatatactcatcacttatatctgctttgcaggtaaaattccctttaaaaagttaaatgttgcaaaagaaagttttgaaattcttactcttgactaaaacatgttctcttattggtgaatgaggaagaggaacaaagactaacaaattaaaatgagaggatacacactcagagtggggcacttgaatagggaggggcagactaaaggggctgggggcgatgggcctgggtgtttagggggctggagcccaaggcactaggagaagaggcgggttaagatatctaaagtcctgggatcttgccttagagatgacactggaaactacaggccgagtctacggtgccgctgtgcccagccccaccccttctctactgtcctctgccaccagctgtgcatcttctatgaggggtgaggttaataaacgtgagttgctaatttgtagaacatgaaacaggtgtccaaaacaaaccttaatttgctgtgtgcaaatcacagcaccttaatttccccactgtgaccaggaacagatcaggtctgaagaggctcagacatgtgctgggtcattgctacttctgtatacacatgcacctgccggacactgcccatggtgctccctaggaagaactgcaggtggaaaaggctgccacatttctttatgtaaaaatgacaccatcaatgcctctaaacctaaaggagtccagtcacttagctttctggttgttctggtgattttcattgattaagatattttccaggtgttttgagatcaagtctttctacagccatgtttgaaagtgaaaattaactttcaggctatatagtctttcttatggcaaacttcaagaagttttaagaaatgcatttctggccaagtgcggtggctcacgcctgtaatctcagcactttgggtggccgaggagggcagatctcgaggtcaggagttcgagaccagcctggccaacatggtgaaaccccatctctactaaacatacaaaaattatctgggcgtggtggcgcacacctgtaatcccagctactcaggaggctgaggcaggaaaactgcttgaaccctggaggcggaggttgcagtgagctgagattgcaccactggactccagcctgggcgacagagtgatactctgtagaaagaaaggaagaaaggaaggaaggaagggagggagggaaggatactccattgaaagaagaaagaaggaaggaaggaagggagggagggagggaggaatgcatggaaatgcatttctgcatttccagcatgcagagatgtccagcatgcagaacagcaagagcaacttgaggtattctcaagaaactggcagagaagagagagaacctagctgtagaaagggaaagaaggaatggagggcttcctggaggaggtggcatttgagccaggactgacatcaggatggaaatgtcaggcagggagttgggtagggggagcagctctgccctccaggtccccaactcctcctatccctactgtttctctgcctgagggaccctccccctgatgagattctgctcctccctgagacgtgaaatgtctccccctcctcctccagccgccagcagaaagggctgctttcccttcagcgtgcgcccctccctaatgatcactcagccaccctgagcagtgagtctcattcttttcagtaaatcctctcgctgcgtggtgagaaaactgatgcctggagtctgtgacctgcctaggaccacagaactcggtagtaggaaaaatcgtatttttaaatccagtcctgagtgggaagatttgaggaaatagctaatattgaggaggggggtgttgttgggagtggcaccacccccatctctccctgctcttcacagagaattccgtctaccaggaacggcaggaatgctatgcgttcaatgggactcagcgcgttgtggacgggctcatctacaaccgggaggaatacgtgcattttgacagcgcagtgggggagttcctagcagtgatggagctggggcggcccataggcgagtacttcaatagccagaaggactttatggaacggaagcgagccgaggtggacaaggtgtgcagacacaagtacgagctgatggagccactcatccggcagcgccgaggtgagggctgtgaaccagggctcctggggcagccgtgggggccgggcccagggagtaggggcagccgggccggcctaagggaccttagtgccaggagggaaggggactttgagctggggattgatgggaggagcccaaccggagcttgtcaggagggtgagcacggagattgggctgagcatggagtgaggaggatggagggagagagacccctgggacttcatcaggcctggcagctgactgcatgtggggtgaggggaaacgaggccacaggacatcgtgcaggggtgcggtgtggagatgaaggtggagatggcacagcaggccacgcagagaagaaacctgcagggagatggccgggtttgaggtgcttgaggggccagatgggtggtctgatgggcaggtgagagaagagtttgcagcgggggaggggcctggcctacatgagaccacccagggagaggggacccatcgggaggagcataggactggatcctgggaactggacattgtgattttgtaacggctccattgtctggggtatataccctggttctttgtcatggccgagaaaattcacgacacagacacacgtgaggagtgggtttgggagtggaaagtttaatagaaaagaaaagagagaaaaaatccttcctcatgctgagaaagtgggttgcccaaaagagggtctgcggtttgtggtggaatgcagtcggttttgtacagaggttgaggaggcggtgattgatttacacagcgctcagggaattggtttgaccagttgtgtcatttacatagcccacgaaaagactgactctcccaccctagtcttttattattcaaatacggtctccaactggtggtggacaggatacctgtacatgtggttttacctggaggctgccatgacacctgtaaacgtggtgacaaggaaaagagagtgggaaccgccatattggatgtacctgacttccaggtacagctgccagcatttacatataaaagcttctagtttgcatatctatgcctgagttttcaggctgcttcctgttagagaagaaatggtttggggctgctttttattaaaggaaaattccactgagaatttttaccctttctagctgcctaaaaataatttcttaataactcctgtattatttcctccctcaggagacgtaaccataactgctgttagggggtgttggacgacgattctttctggctacttcctgctgaaaaggggcgtcgtgtcggggggctgcagttggggctcctcctgaggttgatctaaggcttcttggaagaatggcatgtccatgtgtggctttgtttgcagcaccatttgaagtttgattgcttctaggcaaaaagagataaattttacaagaaggtttaaaatatagggttaccatatgagtattaagattaccacctatagactgtaactatggcagtagagtttgatacctgttacaccaatggattgtaatactggtttgtctccactagatgtcgctgtacattaccagaaacgttaatataaaagcatcatttcctttgagaaaacatgtttcccccttgacttgctattagggcataatttttggtttaggccattctttataacttatgatatgattgggagaaaaacgttattgggtggctaaaataactttggtgttaatcttggcaattcctttcctttaattattaaatttcttaattattaaattctttcatgactttcacagaccctcttacaatgtactcaactttctgacttgtcttaaacaaccagtcatttccttttaggacaagaatttactatacaagatcctttcttatataaaatccctttatttgtaaccttctttccatagcttagagtgcaccatttaccaatcttcaataaaaaagtcctatcaaacttagtgatagtaaaattttcatgcttacttcttgtctgtaactattactcctgctataagcaaaacaaacttgaccaaatccttcctgcaattattaattctgtcataaagatgataattaggcaaaatattacaggaattagaattttacaaccagaattccacattgtgggtgccacagtatacagttctattgcaaataacagcatgatgataacaattcccacaaaagtgacgtagtaaataatttccatttaaaactttacttgccaagatataatgtttccctttggggatttacaaagtaacaaatgcagtcccatgtataattaaaatctctctgcaaatatgcattaaaaaaaagttctaatactgagcagtgaattttgagaggaaaggtagaaatgataaagagtacctggtgaggtaggattggcgctaaggcgagtagccctcactcatttacttaccttttatgattttcagcttaagatcttctatatctccacattgatattcaggatgttcctctgggctgtcaaaggttgctccctcagcttttcaggctttgacttgagtgtgatatattcagaggttgatacttgtaacttttactgctgggggggttgaaagaagaattgtgtagggcccttcccagcctggcttagggaaggagagagagatgagttttcaccaataccaaattttctggtggtccaatttcctggggttggcctttggctagttgtgtcaatttctgttggaagtgagctagagaggttacatttttaaacaacttagaggttttctgcctgaaaacaatctctgagcacactgatgataagttttatcctttcctatgtgaaaaagcttggtgaaggattttaaggactttccattgactggaggccagtaaatggagtttgtcatcctcagggctggaatacccttaagaagtggcttattttatttctgcaggggaatactgaggtttaatttcttttatggaggcttccgagattaaaagggcttgaagtgtgttaatgccttgaggcttccctgccgcctgcttagctccctgctcagctaacctatttcctttggctacttcatctgttcctctttgatgttccctataatacattactgctatttttcgtgaaaggaaaactgaggataataacctgttaatttcctggtgatattttataggagatgctttagtggtaaaagaatgtctttccttttaaatagcagcatgagcatggagaactaagaaagcatacttggagtcagtggaaatgttagctatctttcccctgcttaatttaagtgcacttgcaagaactattagttcagctaattgagtgcttgtgtctggggagagacattagagtgactattgcttgtcctgccttatgtatttcttgctttacctgctgtttgttagctaaagtctcccctagaggacagtaatcctgctacattatgtggggtgtaaacagttaaattatttcctagggttaatttggaggcttttttgactagtagagccaccgtggcaatggcttggaagcatgtgtaaacaataggtcctcctaactgcaattaggaggttgagaaaaatattggaatagagtttttcctgagacaccccttacactcacgctatgggaagaagagaggcctggattaaagaggagaaaagagagagagactggctcgagtgtttagaaggaggtctagtttccttccttcaatttccagaatcacctggtggctcccgtgctgtaatggcagtttgagccactggagctggggtttgagccccaggacccatcagtcctgctggaccatctgtgagactggttctgactccagtgacctccgtctccgggggcagtttgatttccagtggtctccaccacaggctggatagggttgaggtggcttcctcttgctgtttgggcactcctttttaaaatgccctggcttgccacactgatagcaactagcggatgcacctcagaaatcttggactttgcaagcttgcaaagctgctactagagcctctgtctttctcctgagctttctctctttctggggggcctcctcctggtccctattataagtggccaccctcaggaggttccccaaggtgctatctggtcctatagcgtgcttctacagtttccttctaatatcaagagctgcctgtgtaataaacttgtctttacaatgagccatcccttgactgaattaggggctaaggaagtgtgctctattagtgcctctctcagcctttccataaaagctgcaggattcccatctggcttttggtctatcatagacagttgagaggaattaagaggtcaggccttagttcttcatagaccctctaatatgcatattttaaaaatgcttccatttctattcatttgcagagctactggggtcccagttggggttgtcgagaggaactgcttcccttcctactgggaatggtgtttctgttatttttttcactttccctatctcttttcttcccttttggtgtattataggagatatgttgctcatctccaaaattatctgctgcctgcagagctgcctgcttttcaactgcggttagagtttggtttaggagcagcataacatccttccatgtgaggtgaaacacctgagttaaattctggacagcttctatatacctattggggttatcagaaaattagcataagtcttcctttgtttgcctaaggtcctgtaatgaaaagggagcttgaggttgaagggggccagcccctccacacctgtgggtatttctcatcaggtgggacgagagactgagaaaagaaataagacacagagacaaagtatagagaaagaacagtgggcccaagggaccagtgctcagcatacagaggacctgtgccggctctggtctctgagttccctcagtatttattgatcactatctctatcatctcagtgagggggatgtggcaggactatagggtaatggtggggagagggtcagcaggaaaacatgtgagcaaaggactctgtgtcataaataagtttaaggaaaggtgctgtgcctggatgtgcacataggccagatttatgtttgactttacacaaacatctcagtgcagtaaacagcagtattaccaccagcatgtctcacctccagccataaggcggctttctcctatctcagtaaatagaatgtatgatcgggttttacaccgagacattccattcccagggatgagcaggagacagatgccttcctcttatctcaactgcaaagaggccttcctctttcactaatcctcctcagcacagaccctttatgggaatcagccttggggacggtcaggtcaggtcccttcccacaaggccatgtctcaggctgtctctctcagtggggggaacccttggacaatacccaggctttcttgggcagaggtccctgcggccttccacagtgcattgtgtccctgggtactcgagactggagaatggcaatgactttcaccaagcatactgcctacaaacacatttttaacaaagcacaccctgcacagccctaaatccattaaaccttgagtcaatacagcacaggttttctgcgagcacagggttggggctagggttacagattaacagcatgtcaaggcagaagaattttccttagtacagatcaaaatggagtttcttatgtcttcctttttctacatagacacagcaacagtctgatttctctttacttcccccatattggcaaccctaaataaggggaattctcagatggttcccttggaaattgcctttctaattctgggggattattttctataggcctacctgatatgcctatttaaaaagctgggctgatcttacagtgcttgcaaaggtttagtaaaaaagccatgcccttgtgcaaaagaaaatgagtcacttttctcttcaaagtcctgaggttaaaggagttccagtgtttcagagtgcactccagaggggtgcaagctgaagctggtctgtcacccatctagaaaaagaagtgagaataaaagtatcctttcgtccccattctttcattgtgacccagggtggaggagaagacagtggaagtgtcctccctactgttttctctccttggttcctgggtcctggcaacgtgttaaatgtaccacccatggttgtaggcgtggtcctccaagccgtggaactggataaactaagtgatgggattaaccatactttacccacacaaccttagcttatccaccttatgtgatcccctttgacgtcctaaatttgtgtgatctgcctggctcccagaaaaatggatctccagagagactatgtcatctttgggtaggctcctttaacggaggcagtgtgctagattgcctgccattacggcccatgctaagacatttacccttagcaaaatggctctggttaacttccgaacctaaaatccccttgctaattaagtactatcctaattggagacggaaatgaacgtaggaacctaatggctgtttttcctgctgatgagacagtatcagaactaaaatttcactacagaggacattttactccaaactgttgaagacagtgctttctcgttcacagaagaggcttttctagcggcacgaaagaatttggaagcggcagtgttacggtaaaaaaccgacaaggtgcctgatgaagaggatttttatttccactaggtggtgctgttggcttagcactaccatgtgctcgccagagaggatagagagtaacagttactgcctgtggcatttgccgatcttccctaacaggagtgtttccctgaactgtaaaacttcccgcaaattgcacacacagagagagaggacaggagacatagtgaccacggatacaaaggaaaggaaaattttgcaacgggttagctggagatccattaccaacacctggacaggctgtcggaggctgcgttcagtccagaagcctttgaataacaccagggtgtgccctggccagaaattttcagttgccccaagactttcccagcctcatgcgatggtgaagttctccatgaaaggaaactggtatgaagagattcttgagattaaagaacagatttgacgtttgctctatactcaccactccgatgtttctatcttccattctgatttggatcccggatgagctcccaaaatgaaacagctccactgtctagggtatataccctggttctttaccatagccgaaaagaattcacagcacggacacacacaaggagtgggtttaggagcggaaagtttaatagaaaagaggagtgagaggaaaagcttcctaatgctgataaggcaggtcacccaagagagggtctcctgtttctggtggaaagcaattggttttgtacagaggcttgaggaggcagtgattgatttacatagggctcaggggattggtttgaccaggtgtgtcatttacataacctgcaaaaagactggccttcccaccctagtattttattatacaaatgcggcctccacctggtggcggccatgatacctgtacacgtgctttaacctggaggctgccttgacacctgtaaacgtagaagggaaagagggtgagaatagccatattgaattacctgacttccaggaacagctgccagcatttacataaaagcttctagtttgcatatctatgcctgagttttcaggctgctttctgttagagaaaaaatggcttggggctgctttttattaaaggaaaattccacccagaacttttaccctttttagctgcctaaaaataatctcttaataactcgtgtattaatttggccaagagagaaatcccgtgaaggagaccaaaaagcaccagtgagcctctcactaaacaaggacctttgtcctagagaaagaggaaagaatgaagggggaggaggaggaggctcaggaggtcacaccattgatccctctgttcctgggaaagtgaaaggaaggtcatctgataagagggagaagatgcacacattgagtaaggatgaggagagtgacatgggtttaggaaagttgctggcgtaattggttgagagaggtgtccaaataaaagtaatacaatttgcaaaatctgtcactaagacttcatagaggcccaaatcagcgacatggcagcattttctttcatggtaatcagctgccagattgcagagaccccctgatgccagactaaggagtgtggatttctcctctaggccagcaggtccccaacctcactgctcagaagactctccttgagatcctctgtgaagcaaagattcccccagactcactgcctagagattcagattccctaggtggggaggtctggagatctgtgtttttaatcagctcccaagtgattcccatgtaaccagataagtgtcagaacactgaagatttttgaaaatcttcagaaatcttaaaatgacaaggctggaggccgggcgcggtggctcacgcctgtaatcccagcactttgggaggccgaggcgggtggatcatgaggtcaggagatcgagaccatcctggctaacaaggtgaaaccccgtctctactaaaaatacaaaaaattagccgggcgcggtggcgggcgcctgtagtcccagctactcgggaggctgaggcaggagaatggcgtgagcccgggaggcggagcttgcagtgagccgagattgcgccactgcagtccgcagtccggcctgggcgacagagcgagactccgtctcaaaaaaaaaaaaaaaaaaaaaaaaaaaaaatgacaaggctggaaatctgttttcagaagactgtgaagtcagttggagagagcaggaaccagaggcagggagatgagataagaaactgctattattgtccagggaaatcataataagggcatgaattagaataaagaaaaacacaggggtaggggagacggaggaaagaggaggatagaagttctggccattccagtgtggatgcccacccaaatctagaattaactgagcaaaggcaactagaacaaacaggaatccttgccttggtgaaatatatttgaactgggtcagaaatgaggccactgggtatcaagccttagctgcagcgccccctggaggtctctgatgtgctccaggctgaccagctcccgtcaaagaagatggagcaaagtgcttctcatggaatgttctgggaccttaaaacagacaaccatatatcccatgactttcatgcttcccaggacacctatggggaagaagttccacttaatctacagttgggattcagacatgggctgaccagtctgatggatgttgagtttatggaggtggttgaagtagaacgagagccaagtgcctctgaaataaaatcacatcgagggaagaggctgtgaatgtgaataatcctggacacaaggcaaaaatgccatagggagtaagggttgggggttagttaaagactgttcatttacctggcccaggcccatgtcagtgtatttgtgttctcaagaacagagtaaataaggacctagaagctctgatttggaacattcctgtaattgagctgttctctaggggcagttggcccttttctgccttctgtggaggaaaagggtactagtggctgaggtccaaaggaaaagctgcaggtggtagcgtggaaattgatctgtaagcggcagaaaaagagggggcaaaaatagagaggtgccaaggcacagccaacacctggttatctgagaacctcaatggatgtgacaacacagtgcagaggaggaacttagggaaaaggatgggatttctactatttaagcatgtaggggctcaggatattatgtaaataggacgattttgagtgtttgtaggcgaggccaaaaaatccataggttacttgcagaataagtcacgtcaagctcactttattttcttgatatatttatgaaatatagttattggattaatagaccatgagaatgttgtttatatatatattaatttcaagaaatcatttgagcaaatttttcatcttttgcatcaggatagagcactcaaaagataaggtagtgtcgctgctgattaaatattctttgtccaaaggctgttaatcagtggctgatagataagatttcttttaaatgtgctacaaactggtaagtttgtgtgcctcctattcttctcaatactatttctatagtttcaatactccccttatctgctgacctaatcacatcattcctacttttttttttttttttttttttttttttgagatggagtttcactcttgttgtccaggctggagtgcaatggtgggatcttagctcatgcaacctctgcctccggggttcaagcgattctcctgcctcagcctcctgagtagctgggattacaggcatgcaccaccacacccagctaattttgtatttttagtagagacagggtttctccatgttagtcaggctggtctcgaaccacctgcctcagcctcccaaagtgctgggattacaggtgtaagccactgcgcctggccatcattcctattttcaacatctagaaatcaattccataatgagcatgtctaagaaataataatctcaaatgctattccacttttccacttcgccactcctagtccagcctagggtgaacatctcccctccaagaaggagccccagcagcaccacgacctgcttgtctaccacgtgacagatttctacccagacagcattcaagtccgatgcttcctgaatggacaggaggaaacagctggggtcgtgtccaccaacctgatccgtaatggagactggaccttccagatcctggagatgctggaaatgaccccccagcagggaaacatctacacctgccaagtggagcaccccagcctggacagtcctgtcaccgtggagtggagtgagggtctgatgaccctctagactccacctctgaagagcaggggactctctggctctggggtccactcatctggttttatgtgtctataccctgggaccatgtccgaccccatttttcttctatagaagacactgagtgtagttttaacctggggacaatggagacttgcctgcccccggcctaggaggtcctaaggattcatagttcctctccttgtccaagaatctagggatgcagacaccttcctgaactgacgttacacatgggaactgttgtcttccttcagccttttagcttattctaagttattttgagaggcaactaattgaatctgaatttgtctgttgttgaggtcacaccctctgttctagaattgagagagtgactgtttctcagtttcctgtcatgcaaggtgtattcccctcgctctcctcgtgccaatattctgcatcaggctgcaggatctcagacaggacatgagcaggggtgcagctgctggaggtgactctgaacctgagcctgttcttcctagaggcacagtctgattctgtgcagagcaagatgctgacaggagccaggggcttcatgctggggctcatcatctgtggagtggacatcttcacgcacagaaggaggaagaaaggtgagaaatcctgtgaggtgaccgatacccacctttctcctgacttgctcacccttcttccatgatgaggggctgagacaaaaaagcaatgccagagagcttgctgaaatcacatagtcaggaaacaaagacagcttctaaggagagaggaatcccagcctggcatcttaatgcagccagatgcatgaggtcccagttactcaggctcctgcagagcgtccattgagtgatggacaatggaagtatgatggaaacgtttctctaattgtctgaggtggtttcagtagctgaatacattctctttcttcctttcatttcagttcaacaaggatctgcataaacaggcaatattcctgctttgatttccttgttgggggagttacaggaggacataagtcctttctgtacattgtgacactgaggctcctctaggaagagagtctcaggcctgaacccctgtttcaacctcagccctggggtgagtggggaaagagcattgcatggctccattgctaaaggaagctcagatcaactctattctttatcagcctgagattcagcctctcaccgttatttttctctcctgggacttaaaggaagggggccagcaacctgggattactgttttttacctccacagggttgctgaccttgcctaaaagactaatgtaccttggaacaagcattttctgtttctttagtcccagtacctgcttcgaggacagacccccagcctcccaagaggatgctgctgctgagtagttgcactgaagccagtttctatcattctgttcctggattcaatgcatgatttctctcatggggcctccaaccaagttcctttctccttagtgccatgagtaatcaaaacccaacatgattgttttctgttaagaatatacaccaagtcatgtctcatcacttttttttcttgagggttttagcaaacagtaagagttaataaagaagttcattgtggtttagacataagaaagaagaaaaccatgaaaatccatccaaactattgtataaggtggcctgttggacatagacctctcctggatttactatatttcagtgagctgccccatcctcatgtttggtgtcttcatccatttaggtctgaaaccactattcttagctattcagtggtgaacagactgcaaatctgtgttatagggcccatattaacatagcactgattcaacatataacttactaagagcatgttttagcattactgttaagaaattaaataagcatcagaatttaaaacgataaatataatctaacacactttcaacactttctttgcatgccatcacaaatactccttaaccaaatgttgcttggccttttgaatgcatcaagtagacgacatttatcctctaagtctgcattcattcaccagcctagacctcctgagctaataattcatacagtgagaaacgcctccccattgttgaaagtgcaaagcaataggtgtggcactctttcaaacactgatcttttttttacaatccaaaatttttatgtgttttgcatttcatattaagttactgtaaatcaaggtagaagacatgtttggtctaagctttccttttcgtgtagaggatggattcttaactcctgatacacataatgagcactcagtggctctctgatacatccagttgttggcttccttctccctgacttctcacaagcagcttctgggccttgtgtgcccctgggcgcctatccctggtcagtttaccagagctacccgtgttcctctcactatccaatcagagtcatctccttccatttttgtcccctggacgcatgctgtaggtgtcagccgtacccagagtggagtgaacaatctgcagactaactcttgcaggatgcaaaactgaggtatctgcacccataatgcacctgtatcctacaattacaagtccaggatatgcattcctaggaaactgagaatataaggagtcacagaaaggcatcagatgtgtctagctctgacatacacaggtatttattgaactctgggatttctcaggaaaaatgcagtgcagagaaaggtccctgatgagaccacagcatacagaccatccagtgtgggcaccaccttgtcactacactttaaattcttcatattgattgagtgctatctaaatgtcagaccctttgctgagtgctaggtgcaggaggatcataggcagccaggaggtagaggggtcttggggtacataagtcattgtggttgaagagcagagattcaaaagaaagttaggcctggagatttaaaggagaccgaagctggtgacttccttatgtcaacttctgactgagaaagtttgacacctggagtagaataaacacactggggttaggactgccagcttagtgttttgtcccccatccctttccatccctggtcccttcattttctgcccctcacagtgtgaataaactctcacagatgccagaccatctccttcttgtccaggtgcacaaataactgctcatcttcatcagattcaaacatatactccccagagggtctgtgtgtctgcacaaactctgcatacgttgacacatggtctgctgcttgaaggggaagaagactgcagaatgaggaacacataggaaagtacacagaatacaagaagcaagcaggtaatgggaaagtttttaagaatgcaagggaataacacagaaaatgagaaatgcaaaaatgaatgaaaagaaaaggaatggggataaacaatgatagaaatgactcatagaagatttcagttgtttccctggtctctgaagacttacacaaccctcacatcattccaataatgataacactgaacacaatcagaaaatattcactgaacatgtaccatgtgctcaacttattcattgaatcctcacacttccacgtagaagtgttcaaagaaggccaggcgcggtggctcacgcctgtaatcagccgggcatggtggcaggtgcctgtagtcccagctactcaggaggctgaggcaggagaatggcgtgaacccgggaggtggaacttgcagtgagctgagatcgcgccactgcactccagtctgggagatagagcgagactccttccccaaaaaaaaaaagtgttcaaagaaaaacttctggccaggcacggtggctcatgcctgtaatcccagcactttgggaggccgaggcaggtggttcacttgaggtcaggaattcaagatcagcctggccaacatggtgaaacccctttgtctctactaaacctctttgtctctactaaagatacaaaaattagccaggcatgctgtctgtagtcccagctacttgggaggctgagtcaggagactcacttgaaccgggaggaggaggttacagtgggctgagattgcgccactgcactccagactgggtgacggagtgagactctgtctcgaaaaaaaaaaacagaaaaaagaaaaaaagaaaaacttcagctgaattcaatataaaagagtcaaattgagcaatgaacgattcgtgaatcaggcagcctcccgaggcagagtaggctcagagactccattgcaggcatgtggtggaagatttatggacagaaaaaggaaagtgacatacagaaaacagaagtgaggtacagaaacacccaattggttacagctgggtgtatccttatttgaacacagtttgaacagttggctacatatgattggccgaaacttggtgattgacacaagtgtaggctgtttacacctccacttgttatagttcacgatgtacagagaaacctttaggccaaacttaaaatatgtaaggaggcagctttaggctaaacttgatttaacaattttcctcttttggtaatcttctcaatttttagagatttaccaaaactttagtcatcgatgccactatcaccattgtaaatgtacttatttggtcttgaaaccccctgggaaatagcagaacaatgagttttgtaagggggaacaaggatttcaggttattttattttattttaattttatttttgtaagggttacctccttttgttggaacgttctgtttataggagaaaaaaacaaaacctggtctgttttaggatctatgtgtttccttaaagtcttagtttaatcatgtcacatttagcacaagtgactccattttggtttggtctggtctgttggggcttagtgcatttagcctttcattaaagtccaaaacaatggcctcccatgattttgtttaaaaatgtcccctttttggtcaggttctcacttaggtgagaatgtgaccaaagcttagggccttagcgccactctcagttaccatcattttgggtttccagtctcaacacatcattcataggttaaaatgccatcatggtcacacatttctttcaatcttgtcattctagttgaagagagacaatttgacattctagagatggctgcatgcaaacatttaaaactttcgagagaatacagtgcaccaggtagactactattatgactatcaggaggataataccaagagtttggagtatgctccttacacagggtccccataaaccaaaccacccaaaattaaatagatcaaagaatgagctaaataaagagtttactcatttaagcagtctcttcattaattacctacaactgaatctctgtacacctgacgtgatgtatttctccataggccacaagtgccagcagctgcacagatacttctctgtttagccagtaagtaatctacagcaatcctactattaagcataactttcacaaaagaatgtaaaatctgttgtgtaaccatcgcccttacagtagactctgtttagagcctatcatgagggatacatttctaatcattgcctgttttactccaaatcatggtaaaaaggacctaaggaaaaatgcccttctagaagactgaaggcctcctggcaatgttctctttaacccatgatgtggaataggggagtgaatcaatgttctgtttctgactgattatgaggcaacctatgtaccattaaaatttctcacctacactgggccttcatctttcatctatcaaggtgtgaggttatccatgtataaggctggctgcaaaacccttcaccaataaaagtatacctaccccataagtgcacacaacagacccccttttcacttctactgttcatagaggcatcagcaagggaaaaaatactcagagataagagcctccatatagcagagaagtcttgatctgtgatcttggtgaaagctgttcacatcaaggataccatcttcttctgggaagaaacttccctggttagctttaccttacgggttccaatgggtgtatatttccaagaatgtggagggatccttctcagttgtgagatcatgaagccaaagttcacggttctgatgtttactgcagtgtggatggcaagggcagtctttctctgatgttctcagaagatccaatcttcaggttctagattgtgaaggggttgattgtcctcagtcagtgaaccataaaaagctttctttacctggtgaaaatacactgtgaaataataatctactgttataacatcagttcacttgtataggaaagcttttacacaaccagaaaacatgcattgaaaatgacaattgactgaaatctcttcataaatgtttaaatggctcatgaggtagcagaatgtacctgaagctttgattgtcttcccaggaatatgggtttggcaaaccaaacattggtcataaactattttagcaatttagaagtcaccacaccaatatgcatttaacttggatcattttatcttttccatgatgagtcatggaatgcagaactttaaattataaaagctttaaaagctcaggaaggataaggcagccaccttggttctccatgagtccatgcttgacacggttgtttctccaattgaggtgcatagcactgataactgatgggttatcataggtaatttgagttagaccacagagtttcttcaaattgtgtatctaaacaatttcagtattgggtgatttagcatgaaagacttgcaaagtattttcttggtattcaattaatttgtgttctacttgggatggcagttttataaaccagtcagtcttttaagctccaggaagcaggagaatggcgtgaacctgggaggcggagcttgcagtgagccaagatcgtgccactgcactccagcctgggtgacagagtgagactccgtctcaaaaaaaaaaaaaaagctccaggaattcttacccagtaaaaatgatatgattctaaagttatcagaaacctgtaatcaagaatactttttggggtcctttccatcctttcaggaacctcctaaaagacaccatattctagaattgtgcctacttgtgaagttttcagaaattgcaccagcattaagcaattaactgtggaaatgaccttccttccttccctccttccttccttccttccttccactctctctctctctttctttctttcctttattttgagacagagtatcactctgtcacccatgttggagtgcagtggtgcaatctcggctcactgcaactccgccttccaggctcaagcaattctcatgcctcagactctccagtagctggaactgcaggtgtgcagcactgcaccaggctaatttttgtatttttagtagagactgggtttcaccctgttggccatccccaaaaggatatttagccttagattttgagagggatctatctgcttttgattcctggtgtttcaggaggaaaaccgagttatatcccaaagcaggatcgtagtgcctcctctgtttttcccaaggagtcccaggctgttagaagttaccttaggtcctctcatgtgtgcaacaaaagtggcaagaagacaaaatggagaaaaacaattcagttggctaaaaagaaaaaaataattaaaaaaaaacaaagatccaagaagagaaaaaaccaaaaggccctttaaacatacctatagcttggatatccacttttaattaagctgacttttaactatagcgctctttctaaaaaaaaaaaaaaattatttgattgtttttagagacggagtcttgctctcttgcccaggctggagttcagtggttcaatctcagctcactgcaacctccgcctcccaggttaaagcgattatcctgcctcagcctcctgaataggtgggactaccagtgcgagccaccacatccagctaatttttgtatttttagtagagacagggtttctccatgttggtcaggctggtctcaaactcctgacttcaggtgatccatcctccttggcctcccaaagcgctgggattgcaggcatggaccactgcgcccagcctaaaataatcattttaaatctcttattacttgactttagccaggccaaacagccaatatgtctggcttttgaactttaccaaaggtaatctcccaggtgaaaccaataagctttaacaaggttatgacttaaccacaagtgtacgaagtattttcaaaaaggtagcaagcaatttttacaaactctagaatttccaaacgtagctcagagaaaggaaaattcaagacgagagtcagaagttgttcatgaggggaagagaatcagcaaatagcaaagatcagaaagatatcaaaccaaacaggtctcattccctgagctggaattgaaccctgcctggctgccatcataagatggcaaagcttagccactaagctacaccgttggtggtttccattgttcctcccagaaggaggagcctaagagcagccaattttcagcttgcaaaggcttttaactgctcaagataatttttagagctaactatgacatgaactccaaaattcctgtcctccagagggtggagaccaaaagaaagtaccatcatgtgattataaggtcaagctcccaatgacataaaacaagatgacagggaaaccttatccagtgtttttttgtttcagggacccgcagtttgtaactgaccagtttgccaggctggcttgaacagcagacttctgggagtcctaggcccacattttatcctatttaaccccttttatgaccaaatgacacagaaagaccaattcatagcacaaagtacaccaggtttgctacagcttaagattggctcacaaatacctttttttttttttttttttttttgagacggagtctcgctgtcgcccaggctggagtacagtggcgcgatctcggctcactgcaagttccacctcccgggttcacgccattctcctgcctcagcctcccgagtagctgggactacaggcgcccgccacctcgcccggctaattttttgtatttttagtagagactgggtttcactgtgttagccaggttggtcttgatctcctgacctcgtgatccacccgcctcggccacccaaagtgctgggattacaggcgtgagccaccgcacccagcctcacaaatcctttttatcattaattaaaactttgcagaggagacagtgatttttactactcctacaaccgtttccacacagagagaggccagaagcctgactgctaagaaattcttacccttttgccagcatgccaggcttctgggttccctctttctgagtggccctagcgaccctgttagctgcacatagcctgggggccaagccacaacacaaaggaaaatcatcttttctgatttcagggaaccataggcaaaagcctctcaattttgtaagatgctgcccaagagattgcatgagggaactgaattaacattttcccttccagccacagcaaaatacatgtgacaaaacatagacattagccactctgcttagtgcccaatattgaactggtaaggcttaaacttgcccctggtggggctctgctatctttaatctattcaaagtggggtggaatggcctccagccagaagtttcaacatgtgatctctagacaagatataatagaaagctggaaaaaggaggccgggcgtggtggctcacgcctgtaatcccagcactttgggaggccgaggtgggcagatcacgaggtcaggagatcgagaccattctggctaagacggtgaaactccgtctctactaaaaatacaaaaaaaaaaaaaattagccaggcgtggtggcgggcgcctgtggtcccagctactccggaggctgaggcaggagaatggcatgaccctcggaggcagagcttgcagtgagccgagatcgcaccactgcactccaggctgggtgacatagcaagactccgtttcaaaaaaaaaaaaaaaagaaagatagaaaaaggaaagaagagaaagagagaaagaaaagcattgtctgcagcagggtggggaaggcaaagagttcagggaggacagagaaggacccacctattgcagtgacactaaattaaaagttcagggccaggtgcggtggctcatgcctttaatcacagcactttgggaggccaaggtgggcggatcacctgaagtcaggagttcgagaccagcctgaccaacatggtgaaaccctgtctctactaaacacaaaaaattagccaggcatggtggtgggcgcccgtaatcccagctactcgggaggctgaagcagaagaatcacttgaacccaggaggcggaggttgcagtgagctgagattgtgccaccgcactccagcctgggagacagagtgagactccgtttcaaaaaaaaaaaaagttcaggcagctgcttgtcagtcatgaaggatcttttccagccatctcatcagctctcaagtttcctgctttggggagaaaaaagttccccatgtcccatgatcctgtacatgcctaatcctgtcacacacagccatcagcaaaaagcgcaaggcagatttaattttttaaatcaattagttgtttaagctttttaattcttttttgtaaagtctttaaatgcaaatattgaaattttttagaagcttctgcatatcaataggcatccctacatgagactgtacatgagactaatttgggagccctcattttcaaatgcacttcagtgcagtgttgttcttttggaatgttctactgcaagttatctttagtaaaaaaaaaaaaaaaaattttatttgagacacagtctctgtcacccaggctggagtgcagtattatgatctcagctcatggcagcctccacctcctgggttcaagtgattcttgtgcctcagcctcccgagtagctggaattacaggcacatgccaccatgcctggctaatttttttttttaatttttagtacagacagggtttcacagtgttggccagcctggtctcaaactcctagcctcaagcaatctacccaccttggcctcccaaagtgctgggattacaggtgtgagccaccacgcctggacaatttctgtaaggcgttgctccttccagggcctaatacttatgcatgtataatccagaaggaactcagttcttcagaaattcagtatcacattttttacctcaaatactggctttgctctcaggtcccttgttcaacttagccaatgattttttttcctacctaagtgcacaagaaaaataaaggagtagaacataaaaatctctgtgaatttccaaaagccaaattttacacctttgcaatattgccatttaatactggtttctttctgatccagttagatgtaagaggtctctaaccggatccaagccagttaattactggagccaatccgatcctggactcagttcaatttctttcgcgactttcaaacccaatcaggatcagaaatttactcaaagaaactcagagagctcaacacacaaatctgtggagcttcggaatctgcaagagaacttaccacgatccccagctgctccgagagagaaagagacacaatgggcctggagggtacctcgctaggtcactcagcacttctgggggtcattagaagctctacttccaaccccacttctgacaccacctgataaaagaaaaacttcagccgaataaattttaaatgaggttaattgcgcaataaacaattcacaaatcgggcagcctcccaagccagagtatgctcaaagtctccagcacagctgcgtggtggaagaaagtttatggacagaaaaagaaaagtaacatacagaaaacagaagtgaggtacagaaacagccagattggttacagctcaatgtttgcctaacttgaacacagttcaaacagttagctacatatgattggccaaaactcagtgattggcacaagtgtaggctatggtctgtttacacctccacttgttatagttcatgatgtacagagaaacctttaggccaaacttaaaatatgtaaggaggcaactttaggctaaacttgatttaacagaggaaattattttacatattggggaactgaccacagaagtaaagtaactcacccaagtcacacaactcctggtagaaacaaaattgcgtagtccccctaccccattcccataggatctcagaacccctacaggaccagacataaaaaatactgatatagccacagagaaaggcagggaagtagggagatgaaataaaaatctttcagggaaaaaaataatgaaggacatgaaaagacctccagagtaagtcttagtgctatttatagacttcaagttatgttcttacttttagaataaaaatggtaccttatataattttatcaaaacactttcattttaagtcatagtaaatttaaaaatgttgtcatgcacataacattcacaaaatgttcttgttgaatgtatattttcaagtgtagttctacctggaaataaaagttgttgcatttgaaacacctatgggatagtatcttagctttacctgatgtataagacgcagcaaaaggttgacaacaaaaaagtctattactattacagtaaaagaataaagatgagagagcatggagtccagcctggaagaggaagtgaggcgaaatgacactgcatggttgttggtcctaagcaaggatttcccctccaagcccaacacggggaaaaccagtcctctccttggatgcgtcaagtgacggcaagttcagtgtcacacacggatgttgagggtcctccactgagtttatgggctagagaattactcacctacagaaacgaagcccaaagaaaaaacagatgaaaaacatgatatacaagctgtgctacagagatgtcgtttgttcaccttaggttactttgtttttattatattcacaaagcctaaaactaaaggtccgtgcattttaaagcaaattccaccttcaaatgttaattttcattctgttaaataaacactcattgtgaattttcactctttaggcactaaggatgtaactcagaagacctgggccttgtcctcaagctgcttgaaatccaaaatccaaagagacaaagaaaagaagattgctacatgtgtattttattttgtgttttttaatcttttatttccataggttattttgatcaccactgagtaccataagatatacactggagccactcaggagcataaagagggcatttttgaaaaatgagatttaggaaaggttcctagggatagtgtttacctgaggttagcaaaacagagaaaggggaaatgacatgtccagcaggagaagcaggctcaggagcagagaggcatgaagttgcaaggagaactgcagttcttcagtgtgactgaagccaggggagatgtgcgccgggcggcactgtaacctgccttgtgtgctgatggcaggtgtttgcattttatcccacaggacataggaagttgtgaagcatcttaagcaggacagtaacatgatgagatttgtgtttggagggggcagcagtagggaggatgggttggaggaggctggtttgaaagcaagaccaataggactcttcagccatcagatgggaagtcatgagggtgtaggcaggggcaggaacatggggtgaggcggacagcggatgggtttgaatggcaataatgaaacgaaaagccacaggaatcactaaatcatgtgccagaagtagggatatgaaggagtccagaatacccaacgtggagaactggggcatcagtgactgcaaaggtaatgaaaaatgaaataatcgagagaaggtaagatgttctgtttggaacatgcttagtttgaatttctgtgggaacaaatggagttaatctgaggatagtgagctaaatggttgggtcccagggtacactaggttagtgacacagactggaaggaagctcattataagtgaagttctaaatttggatcaggtcactcaagaaaagtacataaagtcagaatagcaagggtctgagtgtgtgctcctgcatccagacaaacacagacatgaaaaaagaggctgaaaaggagaagactagaaagtaggaggaaaacaaagaggaagtgggttcataaaagacaacagacaggagaaaacatccaggaaagaggagcggacgcatcacaaacacactcatgacacacaagagatagagacagagaagtgatcactggtttgggttgtataaaggtcaccctgagagcagcatcagagacatggggaagaaaaagggagaatgcagtgggttgaagactgaatgaaatgagagagagtcactaacgggctgggtgtggtgccccacacctgtaatcttagtgctgtgagaggctgaacaggaggatcacttgaggccaggagtttgagaccagcctaggaaatacagtgagactccatctctaaggggaaaaatatatatatatatatatatatatatatataattatccaggtgtagtgacagacacctgtagtcccagttacccaggaggctgaggtgtgaggatcccttgagcctgggagttcaaggttgcagtgaactgtgatcacgtgattgcactccagcctgggcaacagagcaggaccctgtcgagagagagagaggagagagagagagaaaagaagaagaagaaaaagaagaagaagaggaggagggggagggagaaaaggaaggaaggaaggaaggaaaaaaacccacattgcagactcctatttgaggaagctgacctctacaatctacgagagaatctccagaggaggttgccaagccctggctcttctctcttcagcgagaggacgtgggggaaaggagacatttatgaatctctttgagtctcagtcttttcatttctaaaattgtgttaataaaagcctttctgaaaatggtgttgtgaggaaggacatgaggtttggcacttagggggtgttcagtaaatggtggttattattgttagaatgagagaaagcaaaagagagcctcaggcaaaacagtaaagaacagagaaaacagaacaggaaagaaaacagcatctgtgggctccagaagcgcccagagcccccaccctccctcgcccacctgcgcactcacccctgatggcccaggttccgagaggctaagcagggcagccagggccatggctcacaggaggatcctggctctgcgctggctccttcagtctttagggtgtattgcaatggccactgtgcgccagaccccaaggagaaaatgaggcggcgcagggacggaggagctccgaatccagcactcctttccctacccctgtccagggagaaaggctggagatgaaacagcctgatggggctcaaccaaccagaatacatcagaagggacgcctctgtggctggggaaggaagatgctagagctgctgggaggaagtgggagaattgtcaggcaccagcatggcccaggaagcccctgactactgcagagtgtaggggtaagtgaagaaaacgaaaattaggacatcataatcgccttcttcttaatgaggaaatacattacgcaagttgggattttttatttgtagttacttctgtgaatggatgatatttcttcacaattttacattgattctttgcatcataaaggaattaatttgttaccatttgatattatattgactcttttatagctatgataattttggagaaaatctttgatgttttcaaacatataaggagaaggaaataatatttaattatttaattagtaattattattttatttcttcttcatataaaaatgtggtgaggctgggcgcacagctgaatgaaatttaaaagagtcagctgggcatggtggctcatgcctgtaatcccagcactttgggaggctgaggcgggtggatcatctgaggtcagtagttagagaccagcctggccaacatggtgaaaccccatctctactaaaaatacaaaaattagctgggcatggtggcacgtgcctgtaatcccagatactcgaggggctgaggcaggagaattacttgaacccaggaggtggaggttgcagtgagccgagatcacaccattgcagtccagcctgggcaacaagagcaaaactccgtctcaaaaaaaaaaaaaaaaaaagaatgtggtgatacaaagaaccccactttaaattttatgtttaagaacaatttctttttctcctttattttctgtgtgtgtgtgtgtgtgtgtgtgtgtgtgtgtgtgtgagagagagagagagagagagaaagacagacagggtctcattctgttaaccaggctggagtgcagtagtacgatctcagttcaccatagcctgcacctcctgggctcaaacaatgctgccactcagcctgcccagtagctggcaccacaggcacatgccaccatgtgcctgcatgttaattcatgtacttcctctttcccaagttctctagtttatagcatgtcctttcctgaggaacataaatcacatgttattgtctgcctttcatcctgagaggaaggagataatcacatggccattttatgcttgaaggatttggtgatcactgggtccaatgaagagcctcaggatgagtcagtgtggttttacccaggcatggagaaattaacttcttgatgatgatcaagtcttcttattaaataggagtgcaactgatagaggatcttcttacatttgctttatttcatggtgctgcccaaattcatgctgtaccctcagcagcaaggagtgggaccattactcctggcgttcccagatggaacagacaccaagcctggctttgccactgaacacaatacaggactgataaaggtcagttcttaggaatatgcttcccaaatgtagaaatcaacataagatcccaattttaaataataggtataatagcataatatattattttattttatttatttagagatggagtctcactctatcacccaggctgaaatgcaatggcatgatctcagcttactacaacctctgcctccagggttcaggcgatcctcccatctcagtctctagagtacctgagagctaattttttgtttttggtagagatgaggttttaccatgttggccaggctggtcttggactcctgagctcaagtaatccacccacctcagcctcccaaaatgctgggattgcagaagtgagccaccatgcccagccgcataatacattatcgttctctttatatataatttgtactaagttatagatacacacttattccataactctatgttcaccagatcacctcttgcaggttgtacagtgaaaacacatccttagtttcaaaagatgtgtgtataccagatttttcagacataggcttggttttagaatacagtttactatgatttttgtaattcatcttaattgatgtttaataccgagagagaagtcatattgtctccagtcatttcatgttatgatgtgccactaagtccaaattttatataatagtaatcaggaggctgggcacagtggctcacgcctgtaatcccagcactttgggaggccaaggcaggcagatcacctgaggtcgggagttcaagaccagcctgaccaatatggtgaaatcctgtctctactaaaaatacaaaaattagctgggtgtggtggtgggcgcctgtaatcccaactacttgggaggctgaggcaggagaatcgcttgaacccaggaggcggaggttgcagtgagctgagaccacaccattgcactccagcctgggcaacaagagcaaaactccatcccccactcccaaaaaaaaaaaaaaagttatcaggaaaacttatagttgctacaatattattagattaatacgaattttcaaaaatggcagagccttaaccaagcttaaagagtttttctttcttaactgaacttcttggatgtgactacatgaaattttgatgaaatatggtcataaattatgatgacaagttagttttgggggattttatatattaccagataccaatgccagaggaagagctatgttaggggtcctcagagccaccccaggtgagatgatgccctaggaggactcacagggctcatcatatggtcctactcagggctctgattcattacagtaaaaggatgcaaagcaaactcagcagagggaaaggcacactgggcaaagcctaagagaaaccaggctcaggcttccaaggatcctgtccccctggagccacacaggacacacttaattcctcccacaaggagctgggatgccatgtgtaaaatattgtctaccaggaagttcgtaacagaccagcactagggcctttgggggctttgggggcctttgggggcctttgggggctgaagaagtcagacttcttcagagaaacagaatttattggatatatataggtagatagatgagtggggatttatgctggggattcactccctcaactatggaggctgaggagttccacgttaggccttctgcaagctgctgagacaggggagcctgtagcatggctcagtccaagtctgaagggctgagaaccgggggagctggtggagtaactctgagtccaagaccaaaaacctggggggctgctggtgcaagtccctgagtgtgaaggccagagaacctggagatctgatgtccaaggggaggagaatataggactccctactccaaaacagagagagagtgaattcaccttttttctgcctttttgttctagccaggccttcggccgactgaatgatgcagtgagctgaaatcacaccactgcacttcagcctgggcaacagagtgagactctgtctccaaaaaaaagaaaaagaaagtcatatattggtacagaagatactcttaaatcctacttttctggaaatattggttattatagaagatataggactaaattcattttaaaatttttattttgaaattattattacaaatgttttatgaatcatattagcatataggcaagttttggaaagccaaagttacaaaccagggattcagatgagtgttctgtgaaatttttaatttttgcagaacaccatgagaaattacacattttctattctatatttcttgtaggaaatagaggctgcccatctctcagtgccacatatgagaaagggaagttgtcattttatatatccactgtcaagcatcttggtaaaacagaagaaagcaggctgggcctggtggctcatgcctataatcccagcactttgggaggccaaggagggcagatagcttgaccagcatgggcaacatggcaaaatcctgtctctacaaaaaaataaaaaaaaacaaaaaataaatgtagtcccaggtactgaggaagctgaggcaggaggaacacttgagcctgggaggtaaaggcttcagtgagccgtgataatgccactgcactccagcctagacaacagagtgagaccctgtctcaagaaaaagaaaaacaagagggaggcaatctactttatacccagagaattttacatgcaaggaatttgactatgaataagcctccattgcttaagagagacttcactatttgggattttaagaaagaaatacacaaacaagcaaatctcatcagcagaggactgagaaaccagtgtttataatacccagtgattaatgtaatattgtcttcagtcatcattaaaagggacttagtttaaaagtcatttcgattgatcgccaactcagagtcctcaacatttcaccttttgctttatgaaaagaactagtagattaatttagagtttgacaaggagaagcaggtctcccttgattttctgtttggccaagaatttatcctaacatggtaccatcagaatactgtcagaaagctgtgagtcaactcagatttctcaccattgagtcaagccgtgaagccagctgtcttgggggtaaggatttccatacagaaacactgtaagtaaataatttagcacttgtttcctattcctttttattggataactacagagaattaaaactgtgggttgttttgaattcacaaaagaaatgttttaaagctttcgaggaaaaagccagattatccattgcaaagcatcgaaattcaaaatcatgttaaggctatagagaaataggatcctatccccacctagtggccaacactgaaatctgggcttagaacaggaaacaagggaatttgtcaacaatttgggaatactccagcattctttacaaaaaaaagttagagaaaaagttaagcacacaaaaaacacaagtcaaaataaatacgaccaaatacataggttttggcagcacatagatttctgtggttttgctatgcttttagcagcggctgtaaaaagcattgcacactaagcattgctagattgccaaacaaacctaattacattttttgtttggttttttgtttttttcaaaacctcctaacctctgtgacctaattatgtttttaatgagttgattgtaaaaactaacatcagcgaatacaaaatttcagttagacaggaggaataaattcaagatatgtactgtacaacatggtgactctagttaataacaatgtactgtgtacttgaatattgctaagtgaataattttaagtgttctcacccaacacaaaaaatatgtaaggtaatgcacatattaattagcttgatttagccattaaacaatgtgtgtgtgtgtgtatatatatatatatatatatatatataaacatcatattgtataccataaacagattcaatttttgtcaattaaagaattaaatgaatacatatatttttgttgcacagatgtatgagagattgatcaataaagattctaaaatatttgttaaaagttacaaactgagggaaagccttcgacatcgtatttgcaagaaagaaagtgtacatagttagacagtcctagtatctgtaaagtgggtgtgatcatcggagagcaatcccttgagcagtgctgtcctatacaatgttctgctgttagggaaatgttctgtatctatccaaccgagccgccactagccacaggtggctcttgagcacttaaaatgctagcagctggtgagacgaaggggctgaagttctcatttaatttcaaattaaggcagaaccgcctataagagaaagtgctaaagaattggaaaaatgaaaaagaatttgagaacccagtgggaatggagctaacgtgtatggtcatggctcattagatttggggatatcggaatcccaacagcacaatgggctcattagaaaattaacaaggttacaaaacaggttaaaggaagtatcaaaaatagtccaattttagcagatacagaagctgcaaatttagcagtagttttggcaaaccctcaattcatgtaatttaacagtgctagggaccaaaccgaaggggaatgccaagacaaaaagcttataaacgttaagagctcatttctcttagaacatacagaaacagggcacttccacaccttcgattcattctccaagcttaaagagctttgccctaaaaccagatcctctcatacgatgggacaaacagccccaatgttcttccctccagatctgttccaacctgtgtctggagacactctgcactcacgttaaaacagtttagacaaaggacaatgtttaggaattccagaaactttgggatataacatcaatggcaacttttaattaggaaaacccaatctaataagaagggctattttgaataccagggtatgtggaggggaaagtatgaaggtggaaggttatgaaacattaatgggagatacagagaaccaagaaagcttctatggtgatttctcctgcccctgggcatgttatctgaacttacgattgcaactgtgggagctggaaaagctcttaagaacctctagaattccacttccccacaaaacaacgtaatatgaaatagtgacaaatccctaggagaatatgtaaaataacaattatgataacattgttggagaaatctgagataaagagtaggactctttaacaactcattttggccagtcaaaagggaggtggagcttggaagtgaattgtgaattacaccgatattaagaaaagcagctaattctgaagtagtattaagtggcagtgactattctaatcactttaaatatttaactcaattatgaaaaaaatgtgattagcactgtacatgatattatttccttagtagaagatcttgctaaatcaacccttgattagcattcatgcatcaatctggctgatgtatccttttcaatcccaataaattatattcaccaacagtctgccttcacttggcagccccaacctttactaagttgccagagtaaattctcccacctccgaggtacaatccattgagcaaaatttaaacagcctaaatccaattcaagaattaacattgttttattatcctaatgacacattaaccaggagtgacttgaaaaaagctgtgtccatgaggaaactttttggggtaatagaaatattatcttcattgtagtagtagttacacaatgaatatgtttgtcaaactcataaacaactgtacagctatggtttcactgtatttaaattatatctcagtaaacctgattttatttatttatttatttgtttatttatttatttatttatttatttttgagatggagtctcactctgttacccaggctggagtgcagtggcgcaatcttagctcactgcaacctccccctcccaggttcaagcaattctcctgccttagccccaagtagctgggattatagatgcgcaccaccatatccagctaatttttgtatttttagtagagacggggtttcaccatgctggccaggctggtctcaaactcctgacctcagaagatccgcccacctcagcctcccaaagtgctgggattacaagtgtgagccactgtgcctggcctgaacctggttttttttaaagcaactgcatcaaaaacctctgtcttccattattaattttatgagttaaaagaaacagactataaaagagcacaaattttggtaaaattttggggagaaaaattctgcccaagaccaggtaaaagcctttgtgcttgaaagcccccaacttgaaaaagaggaacagaaattaattggcgtgtttgaattatgaagactgcatatcccacatctgtattaaacttgggtctcttcattgaattatgtgggtccttaaaagagcctcagagctgtgctgtctaatatggtagcactagctagctacctgtggccatttaaattaaataaaattaaaattgaatttcaaattgagtttcttagtgcactagccatgtttcaagtgctcaatagccacatgtgaatagtggccaccacattaaattgcataaatgtagaacatttccatcatcacagaaagtgctcacagacttagaggccaaactgtcttagaggccaaacaggtatatagaccactggagtttaatgacttaagtattgaatacaaaattaggtggcatatgtctctgaaaattcaattggctgatatttctaaccattaaaaccatcttgagatggccaggtgcagtggctaatgcctgtaatcccagcattttgggatgctgaggcgggtggatcacctgaggtcaggaattcgagaccagcctggccaacgtggcaaaaccctgtctctactaaaaacacaaaaaaattagctgggcatgtatctggggaacccacccctaatatttcaatgcaggttctttctattttccctaagtgtcggccagtctgagaaataaagagaaagagtacaaagagaggaattttacagctgggccgccaggagtgacatcacatatcagtaggtccatgatgtccacctgagccacaaaaccagcagctttttattaaggacttcaaaaggggagggggtgtacaaacagggagtaggtcacaaagatcacatgcttcaaagggcaataaagatcacaaggcaaaaggcaaagcaaagatcacaaggcaaagggcaaaattagaattactgatgagggtctatgttcagctgtgcacatattgtcttgataaacatcttaaacaatagaaaacagggttcgagagcagagaaccggtctgacctcaaattcaccagggtggggtttttccccaccctagtgagcctgagggtactgcaggagaccagggcgtatttcagtccttatctcaaccgcataagacagacactcccagagcggctgtttatagacctcccccccaggaatgcaattattctcccagagtattaattatcaatattccttgctaggaaaagaatttagcgatatctctcctacttgcacgtctgtttataggctctctgcaagaagaaaaatatggctcttttagcccaaccccacaggcagtcagaccttatggttgtctttccttgttccctaaaatcgctgttattctgttcattttcaaggtgcactgatttcatattgttcaaacacacatgttttacagtcaatttgtacaatagtggccctgaggtgacgtacatcctcagcttgtgaagataacaggattaagagattaaagtaagacaggcataagaaattataagagtattacttgggaactgataaatgtccatgaaatcttcacaatttatgttcagagattgaagtaaagacaggcgtaagaaattataagagcattattagggaagtgataaatgtccatattaaaatgaaatcttcataatttatgttcctctgcctcggctccagctggtccctccatttggggtccctgacttcccgcaacaggcatggtggcaggcacctgtaatcctagctacttgggaggctgaggcagaagaatggcttgaacctgggaggcagaggttgcagtgagctgagattgtgccactgcactccaacctgggcgacagagaaagactccatctcaaaaaaataaaataaaattaaattaaattaaaaagtcttgatccacgttgcaaatatcctagtggtgtactaacaaagccagaggcctcctcagacagccagacacctcagaggcagacatatatgcagaggtaactaatggtggcctcacgaggaaagggggcagctactccatgagcacaagctctagatacttagccttcaaatacttcaaaaaacaaaacaatccctcggggagagatttccgagcaaaacaaaacagcccatttgtttttagactcctgctataatgctttgcctaaaggtattggccaaggcgggtggatcacttgaggtcaggagtttgagaccagcctgaccaacgtggtgaaactccatctctactaaaaatacaaaaattagccaggcatggtggcacatgcctgtaatcccagctactcaggaggctgaggcaggagaatcgctagaacctggggagcggaggttgcagtgagctgagatccactactgcactccagcctgggtgacagagcaagactccctctcaaaaaaaaaaaaaaaagaaaaaacgaaaaaaaagaggggttgtccttatttcccctttctccttcagctgactggaacacaaacatgaaagctggaattcaagcagtcatattggacctgagagagaagagctatgttgaggctggtggaagaaaaagatagatagaaggaacctgagtctctgacacttaaacactacaccagccctagggttgcatgtgagagagaaatgaacttctatcttggtggagacactgttgtttccagggttttctgtttctcacagctgaagctaatcctaaccaagcagaacaagcacaaagtcatcaaaacataaactggagtttgcaaagcacatgtcacttccaagcatcagatacagtaaaatgatgagatgtttttcccaagccctggctcaggaccctccctaacagctccccgacaagccctttgtcttcttagtaatcatgccttgcatggtgccttttccaacatcatgcccctccgtggagctcattagtaaggagcaagtgagattctttttatttatctaatcagtgaattccaaaaactgacaaacaggataaagaaggaataccagccactgttatgaatgtcaataagacatttgttcagttcaggaccatctcaatttcagaagggacctgcatagatttatttgcagtaataaatcaataacaattcagtggcaattatacttcccagtttcccacactgcatctatagcttccaggtacaagtcttagtatcttcaaagcatttgcaatagccataaaatggctctttcatgacagcaaagtggtggcaggcatttctacagctaaggggtgccgaacacgtctcatgcgtcttttctttattggtgaatgtcatgtttgacagtgatgtaaatggaacagctattatgaaaaacgtgcttatagtttagccaaagaaaatatgtaagggtaacattgtaggagggtggagtgtaaacatatgaagagtctggaaccctgatggcatcattaaatgctcaaaccaatgctggaagctgtcatcctcagatttcttatgagaaaaatgaattcctgtttattttagcccctgttttttgggttgtctgggcctgcacttgcaagcatttctgctggatgcagcaggtcccaggaggccctttcagacctagggcatttggttgcctttcccactctgtgcctttgcttatttcttttttttttttttttttttttttttttttgacagagtttcactcttgttgcccaggctggagtgcaatgccgtgatcttggctcaccgcaacctctgcctcccaagttcaagcgattctcctgcctcagcctcctaagtagctgggattacaggcatgtgccaccatgcccgactaattttgtatttttagtagagatggggcttctccatgttggtcaggctggtctcgaactcctaacctcaggtgatccgcccgcctcagcctctcaaagtgctggtattacaggtgtgaggcaccacacccggccatctttgcttatttccttttttttcttttcttttcttttcttttttttttgagacagggtctcattctgtctaccagactggagtgcagtggcatgatctcggttcactgcaacctctgcttccctggttcaagtgattctcctgcctcagcctccccagtagctgggattacagacacgtgccaccacacctggcgaattttttgtatttttagtagagacaaggttacaccatgttgaacaggctgatctcgaactcctgacctcaagtgatccacctgccttggtcccccaaagtgctgggattacaggcatgagccactgcacctggctgcttatttcttacgggatctctccagtttagagcagaggttctcaacacagcctgcactttggaattgcctggggaaattttacacaagtccctttgctcacgccccaaatgggttgaatccagatctctaagggtgagcacaggtgggcatgactatttttaacagttcttctagattagtgattcccaatttttttaaatctcaatttgaaaaaaatctctcaatgttttaagagtataaaccccttaaattactgaaaacactgaaaagctttacttacaatattgttattgatatttactgtattcaaaattagaactgaaaaagatttttaacatgtattaattctttttaagatagcaataacaggcaaggctcagtgggtcacacctgtaattccaacactttgggaggccaagatgagcagattgcttgagctcaggagttggagaccagcctggacaagatggcaaaaccctgtctctacaaaaaatacaaaaattagccgggcatggtggctggcgcctgtagtcccagctacttgggaggctgaggctggagcatcgcttgagcctgggaagcggatgttgctgcagtgagttgagatcgtgccactgtgctccagcctgggcgacagagcaagaccatctcaaaaaaaaaaaaagcaataataaaccacttttgtatatgcttaaatttgtccataataaaagtaaacaaaaaggactttaaataaattacggaaaatgtagatctttaaagaattagaagaccatcagctttatttggatcatgagtcaaacacacacacacacacacacacacacaaaacctacaaaacaatcttggaaatctgaacactgactggatatttgatgacaacaggaatgattattaaaattgtggtaacagaattgtgattacattttaagagtaaaccagtaaaatctttaacaaagacacaaggagggcccatggatccattatgtacagtagccacagtgcctagggcccacaatactcccatggcaatgtttacatttcttttaaaatagaaaaaaaattaaggttgaagaaaatattttaatatataatattaatatagttgcctgtgtatcaacacaatcataagtatgatttcaaatttattgtttagaaaagtgcatagggcccgcagaagtcacaatgcagccctggatataacggccatgaaagtttatgtgctgaatcacaaagtggcaaaatatgaactggcagagatgtcggcctctgaggttagagaggtcatggccacagctgctgaatgtgactttgggttgcccatccaggagattgggtggcagggagagcaaatgtgatcatgaaggggctggttgtatcacgctggtcaaatgcatacaaaggagtctgtttagacagaagcgaagaagggaaagcaagcggacacctcctgggggcctcaggatcccacattatctggaaacagtgcccccaacacccctccacctccaccaaaaggcatcctacatacctcttggttggtacactgggccctcagccacagaaaattggttctcagggacagagataacccaagctaagccaatcagattgtctctccatgactttgaaccatggggcccagagacacagaggtcaagagcagctctgctgagcggtgagtatccacactccagggacaaagtccatgagcccctgaggttcccagaactgctctcagtcttccctattgagtcaactctgtcttcaaatcctgagaaacccaatatttttacaatcaattccttttggagcttaagctattctgaatcagattttgcgatttgtaacaagaaaataataatagtaagtatagagttttaacagcactaaaatcaaaagtggaaaagggacagcagcatgccccagacacccgtgtgtcagcaataaccaagacatggagatggaaccaagacagcttgtcaggtccctcccctcactttccattgcaaaggctgtcagtaaagggggaattattcctttacagagcaagtattatcccactttgcaggtgaagaaactgatgctgaggttaagtgtgcaactcagaagcaaagcatccctgacaagctaagggaaggagaactctcagttggaaatacagagaggcccgctgccagctagaatcagtgccacctttggccctaagtctgctcaacccacccaaaactagaccacctgccactcaaactcttttgtctgagtccctctctccccagggccccaatcaaacagggtgctatttctcatcttctccctaaccctaatgtctctgaaacatgtttgttgggtttggggtttgtttgtttctatagatttgcagttctaaaagtaaggaaaacctgcaggtattaatacaaataaccacaactgggaagggatggaattataagaaatctctcccagcattagtaataccagtatgccttatttcatgaggagagcaggccgattacctgacccaacaatatagcccaggcccgggggagatgtgaacacaatgaggaagatatctctatgacccacattctttggcctgaggctctgccggagtccaagcctgttataggtgaagtggccaagacctggaacatgacctttacatgagctgctgtacagccagtgtggcttttatctgttgtactttgggaaatcatccatgcctcaggaaccaaaagtccttcaacctagagtaaggcgtttttaatagaaagagaggccagataggccaggcgcggtggcttacgcctgtaatcccagcactttgggaggccgaggcgggtggatcacgaggtcaggagatcgaaaccatcctggctaacacggtgaaaccccgtctctactaaaaataaaaaaaaatagccgggcgtggtggcgggcacctgtagtcccagcttctcaggaatctgaggcaggagaatcgcttgaacccgggaggcggaggttgcagtgagccgagattgtgccactgcactccagcctgggcgacacagcgagactccatctcaaaaaaaaaaaagagaggccagataatcccagcactttaggaggctgaggcagggggatctcttgagcccaggagtttgagaccagcctcggcaacatggagaaaccacgtctctactaaaaatacaaaaaattagctgggcatggtggcactcgcctgtagtcccagctactcaggaggctgagggggaagaatcacctgagcataagaagtcaagcctatagtgagccatgattgcaccactgcatgctagcctaggcaaggggagtgagaccctatctcaaaaacaaaaaacaaacaaaaaaagagaggccagagcgaagtacacaaaatggattgacctgctcctgccaactgagggaaagccagacagggtgatatgctggctctcgctgaagctgagagctgtgttcattctaccatcctggccgtgtggggagagccctaaaggagaagcccatgtagatatccttggtctttattcaaggactagcaggacaggtcttccctactgagatggcagtctgctgtcagtgccagttcccatgaaactactctgaagatgaaagaaaagataacagaaggccagttataagcacttaaggtgacttctgcttactctaggtttgagttgagaaacatagctatggcctacacatgtacagtctgtgaactgcacagctcgacagaaagaagctccagtgtggccctgatgctccctgctgaccacaccacacttgcaggaaaatgggctaaacaaccacaaaacaaggtggccaccagctactacacagaaacttatttctgaggcagctggagccctttgtttgtttgtttgtctgtttgtgatggggtatctctctgtcacccaggctggagtgcagtggcaagagcatagctcactgcaacctcaaactcctgggctcaagtgaacctcctgcctgagtctcctgagtagctgcaactacaggcacatgccaccatgcccagctaatttttaaattatttttttgtagagaaaaagggccgtgcgtgatggctcatacctgtaatctcagcactttgggaggccgagatgggcagatctcttgagcccaggagttctagaccagcctgggaaacagggcaaaatcccatctctacaaaaaatacaaaaactagtggtacatgcctggagacccagctactcgggaggctgaggtgggaggatggctggaacccacggaggtcgaggctgcagtgaaccttgatcttgccactccactccagcctgagtgacagagaccctgtctcaaagaaagagagaaagagagagagagaaggagttttgctttgttgcccaggctgagagccttgttttgactcactccctcctctgtctcatctccacccccacctgccctggtccattcaaaactacaaacctcagcatgcaagacagccaagggagggcaagaacagctctgtgtagcccatggccttctaggatatgtggtgctcccaggtacagtgatataagtggtctgtaagttatttttattttatttcacaagttattttttaaccataagttacagatgctaaaaatataagcccaaagctgaaaagcagctccaagggtgtgacaggccagaggacccaccccacagccctccctctatacatgatctcccacgcggtggctcacgcctgtaaccccagcagttgggagaccgaggcgggaggatcatgaggtcaagagatcaagaccatactggccaacgtgaggaaaccccgtctctattaaaaatacaaaaattagccaggcgtggcagtgcacacctgtagtcccagctatccgggaggctgaggcaggagaattgcttgaacctgggaggcaggggctgcagtgagccgagatggcgccactgtactccagcctgggcgacagagcgagactctgtctcaaaaaacaaaaaaaaacatgatctccctgtgcgccccatcccaaaccctcctctccttcgccaccatgccagcgcacaattccatcatatcacttgccttttcaaacaccatctatgactcttagtttttgggttcaagttcaactccttccataagcagtcaatacttttcagaatttggcccctccaacaagagtttatgttctgccccaatcaaacccaaagtagttccctaaagcctctgcctttctcttccctatctcctcccaccccacccagaagcctccattgcccaccagccaatggagacactgccactacccacaggcccagaggcctgggcacttgccctgttcacacccagccccaccccaaaaccccgcctctacagccctgcccttaaacccctcccacccttccttagagcctggctctagctttctggaggggaggaagaagttagctgccaagagaaggctgtgggcctggcctcctcaacagcaacttggcacagactccctcgtgaaactgttagatggggttggttggcagcactgtgtaattaaataggcttttgtggattggcctggggacttagccgccgtatataaatgttattcgagtgactgtacagcattgtttccatgcagaaaagccctcggaactcagagcatctgaccaaacgtgacctttgggaaagtcctcttgctgttcggggggcgacctctgcgggtttggctccagctgcagaaagagcgccaaagaaatctcaactccagcccggctaggctgggagtgggtgcgggagaaacagatggggggcacctatttagatctgatcttctcttaatgtgaccctgagagggagggaagggggtgtctgaagcccctgggccttggatattgagatggagagcatgggtgatcccagaaaacctatccaccaccggacccctgacagatgagatcaggggcttcttcctccattcggccttcggggtcagggggttcagcgggtgacaagggagaggcgtctgagggaccgggattattcagctgacccggtgcggggccgcgttctcagcgcgggcactagggggcggcagaggcggaggcgccagcgccgaggagaggcttccaccctcgagaagtttttccgcgcacccgcccgggccagagtggccgtctagacgcccacgtggggcttcctgcgatcgagaatgggttgggaccgggacggccaagccgatgctgtcggggacacgctgggaggaagaagtacggggaggaggggcgggggcgcagcctacccgggctcgggctcggggtgaagggcagccctgccaggcccgccccgaggccgcggatgcgaaaccgggacacaaaggcacgcactcttgattctggcgcccgcgaggaagagggttgaggaagaggaaattgggatgaggccctggaacacgttttaatgcagcgccctgacaggcaggagccaggcaatactgcttgggaatgtgaagccccatgggcaccagctagggggtcccggctgcgcggccagccttggaagagaggacttcttggacacctaacccggagggagcagagcttctgagtgcccaggagagggaggctagggaagtgggggacagtcaagagtggggggacacaggcagggactgtgcgactccacccaacacaaagactcaacgagtatgcacgtgactacacgtgagtgtggagggcttggccacagccctgtcttcatgacagcacagcacaaggctgatggggagggataaggtgaccagaggtacagatgcagtaaatgtcttggaagtgggcctcagcctccccatttacagagattagactgggctatgtagcaccgtcccacccacacccagaagcaatcgcacacccgtgtcagaaactggagccatagggaccccaaacccctacctggtgtccctggggcattgtttgtaattttatgctagtcacccaggctttgtaaactctgggccctgacaccccagctggacagggcttgcagggtatctggattaagccatacaattctggtaaccacttagctgggaagaggaagcatcagatgggtgtcgggggagactgaaataacaacacaagcagtgacacagacacctgggaggagacaatcacattatttaaccatcagtcagcatggaagctgggcacagggtcctgggagtcccttccatatgccacacattaaccctttaattgcaggatcagggaaagtgaggggtgcccaggggagggacaggggtggcaatgaacatactcagtggctcagggccatggcaatttaccagccaatatagaagaattttaatattccagccatctgcgggatgcagccctgcacacaccccacactattccgtttcttccctgggggagcatcctggccctcaagtagcaggcagtgcctgccaaacccagaccaagtggaagagacagtgggcacatgggccaggcagccaacacctgtgggttagagagccccaccctggcagagtcagagccctgaggccagggagaccacatattccaactttcacagtgggtgcgacaggtgaggtgggaggaaggtgggagggaggtggggttcagccctgaaacccccctacacacagtcactgaggaaagtcctgactccaggatgtgggtgccggagcccacccccgagacccctgtcttcaacatctgctgatttttgttggcgtttctcttttttgttattttgctttccacactttaaataattaatacaattacttttaaatacaaaatacgccatgtcctttctcttctcttccatttgtttggggtgattgggaggtgagttttaaataagggtctcagctctctaacgggtaacaggctccaggtgggagggccaagagccccagatgccactcctcccgtggggtgtccaggcaaccacttcacccctcccctggcctgccccgactgagggctctccacgccctggcccagggctccctagatagtgaggagccctcttgggaggtggcacagagctgatgttgtgggattccaggtgggcctggttccgaatggacaggatcagacagagacggtcctatcccatgaagcagacaggccccagcagcacccctccccgcctcggtggggctcccaggtctgagaaggaggcatccagcactggcagctgctccagcacaggcgttcgcacctccagcaccgtccggccttgctgtgtcttcagggggagacaaggaagaaagtgtgagcaggatggaggcaccccccaccctctaacctcaggcccaggctcacctctcctctgagcaccttggccccatcagggtgactcaggatgtacagactggcagtgtctatgtgcccatgcgtgtgtgtttgcttctcccccaccgtgtgcctctgctgggcagccatgtgccagtctgtgtacacgtctgcattaacctgtgtgacgctggtgtttgtacccaagtgaacctcacccgatggcttccatcctttccaccttcctcaccggcttttgagctccctcaggcatccctgacaatccagcaggacggactcctccctgctccccctgggtgccctgcccaaggggtcttcccacctccttcctccagcctgagtctgagatcagcccccaacccagctcttcctgttcccacctggcagccatctctgaattctttgacataggggctagtctccgggctcagctcatcctcattggccccacggagtctcaggggaccgtcacgggctgctccagagcaggggtaggagacgtcctggtgggctgagacgctgagcagccgcaggaaggtgagctggaccacacccactggggagccctctgagtccacgtaagagaactggaaggagagagagggctggcctcagagggggagagagagggctggcctcagagggagacagagacgggcctcaggagcatctacggcaccaggacagctgagccagagtcatgagcagggaatggctggaaggcaagggctgggaaagaagtgaggggctgagtgggagccaggagactgggggtacacgaaaggcaaagtgagcatcagaggaccggtgaaaaggaaaagaagaaagagctaagaagtggagaaggggtggcaggctccggggggggcaacagccaggggactgtcaccaaaacccagaaaccactaagccctgagggggtgcactatggggcaggggaggggcagcgaggggccagctctcacctgcgtgacgtcatccctaggcgtcacacaggtctcaccccctgctgtgaagttgcagaaaactcggaaggcatcccgagcacagccctggttggggtcgacccagtactctcctgttgggtgagggagaggggaggtcagggccacctaggtccaggctccaagatgctctttgcccccacattccctcttccctcccagccctccccatcatgctcttagtctcctggtcctcctccctcccagagccctagaatctagccctactgctggattctactgcagcatcctactgctgcagcccactttcatcacgtgacacctctgcccccaacagtaaccccaggccctctgactggaggaggtccgagtatggacagcctcatactgggacaacatgtggttgcaggcgctcacacagattcatctgttcaggtgcaaacaggtgtgtgcacgtatgtatgtttatctgctcctgcagacactgggctgataaccaactggtacacactgacccagatcagttgctaaagtattgggatacttctgacctggttagtaaatagctgcagttcccagcccctcagccctcacccttaacccaacaccttcaccaagactcccccagcatccattctgcttgttcagtacccatgctgttggggagatgtttgtgcaccctgaggctagcactgaccatcgggaagctctgggtggcacagcttcaggtcctggcaggtgcgagcagggctgtcctgggtccctgttggccgcctcatctgctcgatctcctcccgcagggagtcgagtgagccaaagatctcctccagccccccaggactgccgggggctcccccggtcggtatggcctcatcttcctgcatcagacggcttccatccaccgagcgccgagtcttcttgggcatctgaatgggcagtggctggatcacctcgcctgggggaccctgggtgcagggacagatggagagggcaagagacaaggttggtgtgagggtgaagtgtggcagcagtggagcagaggggtacggccctgggagcagccctgactcctcactcaccgggtgtcctggagggccctgcacacccttctctcccttgggtccgcctgggccctgacaaggaataaatcaggtcatggaggggtcaagaggtcaagcatggatcaaggtcacagaaagatcaaatcagcctcctggctggaataaggggctccttggggggagtctatttgtcctggagagacatcatcaagtccagagggggtggagcaaaggtcagagctgaagggggtcactcactgtggctcctttggctcctttggggccagcaggtccctgtgaaatgaggaacaagaaagagacggtcactgcaggggaaggacaggactcagaggagcggggaggcaaggtcccaagtccacaggagcctcgggttactacaggaggggcagtcttgtgggaatactaggacattcagagccctggaagtatggggaggaggtactggtggtgacaggacaaatgggggaccctgaggactatgcttgttaggctggtagttccatggaagtcgttgggaggctgtgggtgggcagcagaggggtttaggggattttgtggaggaacagaggcagtactcacggggaggccggggggacctccaggaccaatggggccggatgctcctgggataccctaggaagggtagtggctggttcaactgggtcctcctcccacaccctcctgagcacctgctcgcttacccacagctgagtcccaactccaactccacccctctccaccccactctcaacccccacaacttccgggaccatgccctctactcaccatctcacccttctgcccaggggagccctgaggcccaggaagtccccgatctcccttctctccctgctcacccgggggcccaatcagtccaatgagacctgggtggccctagagaagggtgcaggcagtcaagagaatgcaaagaggagtcatgtggatgggggagaagggccaagaggacatggagagggagccgggcacagggtccgtgagtggccctcactgagcagggactccctgggactggctgccggaggcctgaagcagagcagtgggcacttgggtcccacaggtttcaggggcgagggtgatgggagagacacctggccacgtgtctgtctgtcactcaccttctctcccttggctccagcatcgccccggagaccaggcagccctgggggtccctgtggagagatgggaagtcattctcttaagggagaggtgggaccaagttctccccaacagcctccacttcctccagggcttcagctctgtcccagggcactgccctcacccctcactcagcccaatcccagtcactcaccacaggacctgggggcccagcctggcctgtagctccaggtcggccttgctgaccctgaagatttgagggggccacaggggtcaggaggagcatccccacactgcacccctcccatggcccctcactcccaccccagcccagcccttccctgcagtgactcaccactgagcctgggagccccctcagaccatcagggccaggtttccctgctgggcctgcaggacccaccgggcctgtcttccccggggcacctatagcgccaggatctccctgaaacacacacaaggaatgtgtcctgaatggcagaggagtggggtgtgggcagggggcagagggtccaaggtgggaggcaggaggcagggaggaagggccaaactctaggagcccctagcgcaggaacaagtacagggaacgcctgtccccataagggcccaacatgggagaggtggagatggggtgggcatctggagacggaggcatctgaggggtgggaggcggaggggatgctccagcactagggcagcctgtccctcaccttggctcccttccctccttgtcgcccctcggaaccaggcgagccagcaggaccctgcaggtggagtgggaaggaagagcacatgaggccgtgggcagccaggctcaactcttcccccttcctgtcctagacacacacatacacatgcacacacacacgtgcatacacagggacacgcgccgagggccgattcacagatgtgcagaacagatacagctgtgacagttgtgaaaatactgggtagtctgtacatttggtgaagggccacttgcccacaccctacctggtggcccgtctcctgccccagaaactaaaaaggttcacccctggcccacagaaaagctggccagcccctcctccagtttccattctgctttgtcagtaaccaccactacccctggtgaaaacatacacaccagaacccaggaacaaacatgcccgagataccgcacacccatcaacccaccagctcctgcacacacactcgcccagtgcaatgagataccgcatacccttaaacccaccagctcctgcacacacaccctgccccgggcaatgagataccacacgcccttaaacccaccagctcctgcacacacacacacccagggcaatgcagacaccaggcacctccccacccatcccacctgccattgcccagcctccacccacacagcccagggactgcctcccaaggtctcaggggtccacctcacttactcgctttccaagtggccctgggggtccattctccccggtgggaccaggggatccctagggagagaggaattggggtggctgagtgtttatcctccagccaagggacccctcaggagtggggcacagaagaggggtaaagaggatgaggcttgggctcaggggggtggtggggtcaccaggcactcacaggctgtcctggctcaccatcctcgcctcggtcacccttagcaccatcctggccctgcagaagtgaagcaaggtcagaggtgggcccccaacctggctggcatcacctccaaaactgtcaataccccatccccttgcccaccctgccatacccccggcttcccaatacccaagcccagcggccacacagaggacccccccatagaagccccaccctttttgccccttcccttctctgagtaagactcacccgagggccaccttctccaggggggccagggtcaccaggaaaaccaacaggaccctgatccagatggagaataagagtcagggtcacagctccctaagcccacccagcacagacgcccacaggcacacgccactgcctctctagaggcagtgcccaccagtaccccccaggaagaggtctcctgcacccctttccctaccacgtgcactgcgtgttgtctaattcctcaaggtattaactgcagggcatctctcactttctctccggatcctagaccccaggcatccctctggatgccccattcccagagcatcccccaaactcccgggctccccacactccaagatcctccctcacacacacccatattcccaggtctgtcattcacagggcctgagaggactcagcccccactgccccaaactcacagggttccctttggggccatcatcgcctgtggggcctttaggccctggtggccctggctctcctggctgccccgactctcctttctctccacgttccccgcgtggaccctgcagaacaagcggaggacacagatggcccagggaatcttgaagatcagggatgcagcctctgcttccgagacaccttcagccatcccctactcccctcagtgacaatgggacatacacagaaagtcaagcctacaaggggagttccctagtccccttcccttcaagaaaggggaagaagggctcactcagaccagggatcaggcctcatagaggatggcagggagcagagactcttgctgcagaggagttccagctcaaggaggtcacaggaaaagtggaggcagggttgaggcgggtgacggggactggggagtaaggccttggagctgtcactcaccttgacacctggctcgccctggatccctggagatcctgactctcctggttccccctgcaaagagattagagtcaaaaacctcctctccttccccagccaaaaaattctgatattccccacatctcattctcttttgtctccccacccaaaattggcagaaatccaactcccatcccccacttccatgactggtccactcacccccttcccagttaccttctctccagggggacccaggttcccaacacctcctgggggaccttgtgggccctggaagaggaacagaaataggtgtcattgcttaggatggaggtgccatttcaggggcaaagtcccagatgagcagcccaaggttacagcagtgaggcagtggaggcctcccgggagtaagggcttctcttggcccctgagacgatactagagtttatggtctgggaaagggaggcagaagaccagacacattggtctcaagggacaggggctgagatgactcacatcagcgccattgggtccagctggacctcgaggtcctggggggccaggtggtccctgggggaaacagatacaccacagatgaggaagggaagtgagatggctgagcatgaatggtggagagaggaggaggagcagccaggccagggagttggcagtggggtgtggggtgggggctggccagggaggggggtgactagtatggtggctagggtcagtaggggtcacactcaccataggacccacatctcctgtttctcccttctccccagaggggcctggcaaaccctgtgcaagtatacaaaacatgggcccaggtgacgaccccacccaaagcacagccctaggcagataggccccacagtcccctcccctcagactccgcaggccctccagtctgcatcggcaggctgctggcagagtctggggcaaaacatcaccccatcctgaccccacctctcagcccctgtcctatcccccaacacacctgtaggccaatgggtcctgggggcccattgaatcctcttgttccttcatcacctttggctccaaagtgtccctggggtccccgagctccgggctccccatctgctccctgcagggttgagggaaagcagagacaaggacacagggatgggtcatgggtcaggtgttctctatccacaaataccacacacagctgggtgccaggcccagagcccctgctcccactcccagccacaagggcagaggggagctgagggaggaccagaggctgctgggccttcggtgggggtggaggggtcactcaccgctgctccaggctgccccacaggaccaatgggtccagggggtccaggagggccctgggtaagagaagagagtcagagacaccaaaacagggagagagatcaggtgggactgaggttaaaggccaggaggtcagaagtcaaggtcatggacacttacatgttcacccttgttccctttggtgcccttctgtccggggtcccccacctcaccctgggaggagaaggcagacaagatattagagaaaggtgatgggtagagtgggaaggatgacatgacaggggccaggggtcatgcccaggtcagccatctcatctggaaagaagattggtcggggtctgtggggtcccctcaccttgtctccatcctctccagccacacctggaggcccagcaggaccaggaagccccacaggaccctgcactccatctcggccagtcgggccaatggggcccttctcaccctgtgggacaggaggaaggagtcatggcctggaggtgaccctcaccctcaaacaccccacaggaaacttgtcatagcccatcaaccctaggctcacagacccctccccagtacccctccccaatacccccacactcactgggacacctttctctcctgctgctccagggggaccctgcgggcctgggcgccctggcggaccaatgggtccccctgatcctgctgcacctcgttccccaggggagccctgagaaagcagatggtcagacccccaggaaggagacaccagcccgcccataccagagaacctcagaccacaattcccaaaagctcccaaaatcagatgcattctggctgtccctggacagcctctgcccagccccacagcccctggtggtatcagaatgccactcccacccttcctcacccacccctttcccgggtccttcctaccacttccggaaccccagactcactgcagggccaggggggccagacggaccttcattccccttcaaaccaggtccaccctatgaaccagacatttggggaagatgagacttcacgaaaagagaagggtgagagctggagagggaagacaggctccaaaagatggaagtggggagtgacatggagggggtcagggacagggtcggggtggggactcaggatgcttggtgcttgtgacaggcaggggtctgggagtcacactcacagcagtgcctgggaggcctctctctcctgggaatcccctcagaccagcaggaccatccttccctggggccccagggggaccagggtcaccctaaaaggaaaggagaggtgatgagccacagccatgctcccaaattaaacagagagctctccagccccccctcaaatctccaactacctgttcctttcagcaccccaatccccagctcccccacttcccctctgcctggcccctcactgacctttgttccttcttttccagctgtcccaggtagtccctgctctccagggggccccggggggcctgggtgacctctctcccccatagggccggtttctcctgctgctccctagacaaaagcagagagagttcctgctctcaggcccttcatctcgctgtctgccagaagagcccaccctggccaccctaaaacactccttcagaacccctttatccctgccccaaagctcctgggaaattccccggcattcctgggccactgctgggttttctcctgccccatgtggagtaactacaccaccttgtgtctctgttggggaactgcctctcctgggggacaagacgatgagaatgcgccccaaaacagactgaagttcaggacccctgcctgaaatcccagcccccaccattgaccccagccccaggagtctgggtcaggtggaccggggcaggggcgtgtgaccgagagaagaggggcagacagactaatgctagggtcaggggtccattctctcctagggacaaacctacctgaggtcccaccactcctggaggaccaggggggccggtcttcccttggaaaccctaggcgaggaagagaggagaatgcagtgaaagcaggtgtgggcgctgtggggcagattcccaggaggaaggatcccaggcaggatcacaccaagccctgggccctgggtctgagcagcaccagggcaggctccactctgccaggagaacgtccctgtgggctttccagacagctctggggttaaagggtctgatggagccccctgagaatgggtagccaggagcatcactcaccacttctcctctttggcctgggtgtcccggcagcccatccttcccaggggggccctggaaggggttcagttgtcaggtgaactctcagctggaaagcaggtagggaagaaggactcagagaagcgaggtgggtcagagctcggggtcaacttaccgggggtcctttcggtccaggaaacccgttgggaccctgaggtccagggaggccctagagacagaggtggggggagtcaggagaatgggggcaggggctgagtgggggaactcagcttccttcctggggtgaggagggagctggctcacccaggctccctggggacctcaggggaaggggactttcgatccacactcaccctctctccagggggcccatgggggccatcaccaccagatgttccctgtggggggaaacagagtcaaggagtgggaagagctgctttccagctgtccccgaggtcaggatgttgagggagagctggggctgagtgggcagggggcagttggagccttgtagagaccattcaccttagctccagacttcccagtggcacctcggggtccccgctgaccccgtggaccctacagagggaagaggagttgtcagagaaacccaaatgcccccctctggaccttgagccacctgtttctctcccctgcactcaccgtggggccccgttctccccgaggccctgacttccccgacaggccctggtgggaatgaagcagagagaacattacccagggtgagactccccacagaccccctctacacctctccagcccttcccttctcacgccctcccaccccccagcttacccgggctcccttctctccactggcaccaggaaagccaggaaatcctagggacccctggtgagaacggagaaggggggaaattgagaagttatgaaaggtagggttcaggaaggggcaaagggggtcaggagaggccacaaaggcagtggccagggagacccgagctctgccaagaactaagtggccttggacaaacccctgctgctctctgggcctctttcggtcatctgtaaaatgggggtcagctaaattccctctggggtcccccactgccctgcatctgtgctttctggaatcagggatcagggaagcgaagaggaggagggaagaggaggaggggcacgtatggggcatggcatcaccttgggtccctgacgtccaggatagccaggcagaccaggaacacccagcttgccctgtggagggacaggaagcagttaggagtgagaggaggcccagatgccactccacccctggagacctcaaccctcacatataacagccagcccccacccagcaacacaccccacacaccccagcctctagcccctcattgcttgccccacagctgcctgacttttgttgtctctccttcccgtgagtggattttccccaattctagtgctgggatcccacctcccctgcgcctacagaggtatcaggtccttcagggtcactgtgatctagctgcttcccacatgtcaacctcagctccatctaccccatgagggaggtgggatctaccccagcacccactcctgcttcaccaagaccaatccccctgcaggccctttgcccaccacaccccgactcccgtgcatgcccccttccccagaggctccagggctcatcctgcccaggcagctgcagagcagggcttagaagcagagattctgaagccagactgcctgggcataacccctggctctgcccttcactggccatgtaatcaacaagcatccctgtgcctctgtaaaacctcagcaaaacagtacgtcacatgcctacctcataggatagataggacgcatcagcacagcacctggcacagggcaagtgctggggagagtcagctctggagaccacagacctcactgctattagactctctcatctcagaactcctgctgcttggagtccgaacgcatgttcactctgccttgaagcaacagctactctctaagcttcgtctccgtccaactcttcgtgtcagggacttttccctgacttcttatatatcccctctgcccatcagcagctgagagatgccatttacacagacagaagtatgactaatgcatggccatcttcaactgactggctgacttcagcggcgggcacccatgcccatcctgaccccagtgcccacacccccagaggacccaggcacagaaccctcatcccatcaccttctcgcccatgagccctgggggcccagggtctccagtcggtccagtgcgtccctttggcccctcaggaccatcctctcccctggaaccagggactccaacttcgccctgtgtgagagggaaggacaggtgagtgctggggactggaggtgggctctgggcccagaggagaaatgggcaacagtgaggctgaggagggctagaggggtcccaggagccactgcaggacaggaagcccacagggtagggatagtgtagtgatgggagggcaggcatgacacagaccatggggctatcatcctgtaggggtcaggctcccaagggaacacagcactggaactgtggagtctggagactcaggagaataaaccggtgcttggcgtctccagagtggaggctcagtagaacacggaattggggccagtgtggggtctctactcaccctgtcacctttcacgcctatgtcacctttgaacccaggaaagccatcctcaccctgagaaagatagaggtgagagggcaccacagatgacagagggctggggttctaatgggaattctgagaacataggtggaagcaggggctcgggagctggacggcagtgcggggcaggctggagggaaggcagtgaagagaggagatggcaggactgaggtgctgggaagctgggggcatggtgctcaccttctcacccttatgacccttcagaccccgaattccgtccacaccctagaattagagaggggatagaagtagactgatcaggggatggaggtgggttggaaggaccaagctcctaagaccccatatagctcccctgaccacagccctttgtctcccagcctggtggtcagttaccttgacccctcgaggtcctgggtatcctagaggtccctgaggtccagagggaccctggaagataaaagagaggcatttataaaggggcctcagagtgtcactgtgggggcctccaggggtggaagaaatggaagtaacaacattgctgtctgggtagggttacggggcacaggaattgagaatgtggcagagccatatgaataatgagacaagggaatcccaaggactttgaggctctagagtctgagtggagactccctcaggggataaagacatggaagatctcacctggtttcctttggttccagggggaccttccttccctgggtgaccctgggagtaagggatagaaaatgtgaccagtggcccctgtcaccctctctgcacccctccctacacttcttccaacccaaatttcctgtgacctagtgaagccaactgtccatggacaagcaccaccagtgacctttcagtgcaagggtcactaaaggagctctgaggtcatgcactggggtggaaggccaaggggaactggattcggaagtggggtcccactcaccgggggtccgtctgagccaggcatgccggggagccctggcttcccttgaggaccctgcaggaagacaaagaggctcagggtcactagaggggtcatgtctggacacagacaaaatcccagcagacatttagggttctccctacatccccactctaaaccccctgtcctccaaatcacttagtcacttaccttctctccatgagggccgatggcaccctggggcccgggaagaccctacatacagggaaagagaagtcacaggggcctcccagggtctcttctatccagcctcccggattcaaagcatgagcaacaagggcctgaaacccttaatttcctgtatccttccagggtctcacccattgtggaagcccaagggaagtcatgaaaattggggaacggagtaggggcaccgctcacctgggtcccaggggtgccctgttgtccaggaggtcctggctctccctggggtccctagaaacaggtgaccaggcacaggtcagaaggagatggagatagaacacatttagagcatggagctgagtcccagcagcgatagccaagaaggcaagagcaggaagcaggcaggggtcaaaatggcggccaacaggatgctggcagggacctcgggggataagaatgggggtgggatctcctatccatcactcaccaagctccctttggggccctggggaccatccatgcctcggacgccctgaaacacaagatgggtgtgagcagcctgaaggtggcccggagggacctgtggttttcagaggcccggccattcccgagggtgtgacggtcagacctccaatccatcccaaacccaagcaaacacagctggcccaggcctgcagtgtgtgggactgtggatctgtgggcttgtgggctttggttttgtttttcttgaagatttatttcctatgcccagagccctcagggcaccacgccacatggccctccctgtgcacggggagcgaatgctgaggcagggcagtgtggggccagagcagggggagctcacagggaatgggaagcatgccgagagaggagagggagcaggaaggcagctagaaaggtggagagttggagaggtcaaggggtcacctcagggtcagaagtcagggagtcacttacagggggtccaggaataccaggtgggcctttggggccaaggagacctcgaggtccctgcattcacggtgaggggaggagacggcatgaatggataaaactgtgtccctttagtgctcatgtccccctcctggcttccccagagccccctcccccagcaccagcccttggacactcaccgactctccaggcagccctcgaggcccaatctccccgtcatctccctggaggaggaggacacggtaaagctgctgtgccttctagacctcccctgcacccagcccctacatttgccactacacttaccctctctccatcctcaccagggggaccaggaaggccctgggcaccagtatcaccctgcaaaatgggggaactcataagaggggcttcagagcccccaacacaggcagacaccgaacctctgcacttagcccatccattactttcactgagctcctgccaagcctccagcctcccttccctacctatcctcactcccatagaagatctatccccaattacaacacacacccactaatgtactcaccctatggcccttctctccagggagccctgggagtccatcaaaacctcggtcaccctaggaggaggaaggatagccagagtgaggacacgaccctgtccaagcccacccctccctactgcaccctgagctgggggggtgctgatcctggggaagcctggagaactaggtcatccccaagaaacaactgagcccagcgtgggctgaaggctacaggcttcagggaggggcccaagcctgttaccttcactccaggatctccaggcatccctcgggctccatcagcacctgcccggccctgggagaacaagggaagtgtcagaacaagcagggccgcagtcccctaccctgcaggccctgtctccccacaacacccatccacccctggggcactcacccttcgcccagccttgccaggagggcctgtgaggccctgaggtcctctggggccctggtgagaggagagatggggtggggttaggaggcatagggaggggagtgagggagactgagctggtgaacagatatgggggtgcagtggaggaaagtggtcacctgaggtcctaagtctccagactctcctttcaggccagggctcccaggttggccctgggagagagaagagaggatggccgtaaggaaggacacagccaacagtggcctcggagtgttccccaaaagaagcccctttccagaactatccacaccccacacacaattaaagcatcctccacccgagcaccctgctcactcaccaagggtccagggcgccctgtgtatcccatggggccagggggtccacggagcgccagctaggggagcagggggacagcagagctgagggacaggcagtgggaacccccagccccagcactctccaaattcacccttcctctcctgatcctcatccactgcccaggattctccccaacctccctgttaaccccaaaccaacccaggcctcccctgccgcacactcactccagccaacccttccagtgccccccagagccttccctttccagggaagcagccccactcaccctcgcctgctgcaggatcgcctgggcctgagcctcctgggccgccaccacagggcccttgtcacccccaccactgccaaaccggaactgagggcaaggagagaaggtccaggttctcttccaagaaagccatgggaccctcccagccagaggctttctccagcgtttctgccccttgccccaggttctgcccatccagcatttcccatggcttccagataatcacttagaggattccagaaactcaactcctgccctcctccactgtccagcctctgcctccagaaagactctcttttggttctagagctcctgaaatataggctgttctgcccagtcctagaagactggtgttttgttctaggtcacctaatgaggccccatctccccaaccccaaagacgaatccctttggagtgatgatctttgatgatctttagagactcctccatatctttcctgcccatctggttcttggtaacatgacacaattccttgtcttccccatcagcatgttccaaaacccaagagacaactcactgggagcatgagagatgtgccaggaggaccaggagccccatctgatccagggagccctgctcggccaggggggccctggagtgggaagagaatgcaaaagatggggtgaaagataaggggacatcaagatcttagcatgattttgaaatatcctcttcaacagaataagtgtagattgctctagctctttcctgagtctcccacccccatggggaaaattgagggtgagaaaccagatcagcaccctccccaaccagagtctgccctcctttctggttgctgggaagcacaaccatcccctcattcattaacaagccacctaacaggaaattactgggcatggtagccccccgcttggataccactagctcccccgaagctcccccgtcacatggaggacacccccttaccctctctccagggtctccaactgggcctgggttcccctggatgccagggggaccaatcaatccctgaggaacaaaagagtaggggtcaggtgtgggcattcagacaggtgtggacactcagcctgtggctgaggagtggtctgtgcagaacagatctgggaatctgggaagcgttgattggagggatgctcccgagttctgaggaggaggcctgggcatatgtggggaaggctcagatgagcacatagaaggggtttctaagaaaagaatggccaccaggtcactgctagacttaccgcagggccttctgggccagggggcccctccacgagcataccctgtggagtcaaaggttaaaaatcagaggcgacaggaccagcacactcaaccccacttgcttctcctatttccactgcctcagccctgtgaccagcataacttacaggttccaacactgcaggctctcctttctctcccttcagccctcggggtccatgggcagcctgaaggagacacacatgtagcccccagtggggcccgtgagcagccaggacactaggcctttctccatctcaactccaaccttgattcttagatcctctcgagaccacttcagccctacccgaaagccccacagccctcccctaaaactccctcttcacaaacctttcaagcctgccaaggagacctcagggttccctgcccccccagttcccagccccacctcagcaaacacaacctctccatctccctgagagcctctttcaggaaggtccccagaaacttccagtgtttttgtttgtttgtttgtttttctttttttttgagacgaagtcttgctctgtcacccaggctgaagtatagtggcgcgatctcggctcactacaacctctgccttccaggttcaagtgattctcctgcctcagcctcccaagtagctgggattacactgggattacagatgtgcaccaccatgcccggctaatttttgtatttttattagagatggggtttcaccgtgttggccaggctggtctcaaagtcctgacctcaggtgatccgcctgccttggcctcctaaagtgctggaattacaggcgtgagccaccacacctggcccctttcagggattttaaaccacccaccttcccaaaccctcttctagaggaccctatcccatctcccaaactccctccctagaaccttaagaaaccttccacacatttaccccaatacatcataaaagaatctctctaagattgtgggtagatttttatttggggtaagaggagggcatggacccacatgagaacctgataaaagctaggccgggcgaggtggcttacgcccataatcccagcactttgggaggcggaggcaggcagatcacctgaggtcaggagtttgagaccagcctgaccaacatggtgcaaccccgtctctaataaaaatacaaaattagctgggtgtggtggcacatgcctgtaatcccagctacttgggaggctgaagcaggagaatagcttgaacccaggaggtggaggttgaagtgaaccaagattatgccatcgtactccagcctaggcaacaagagcaaaactccatctcaaagaaaaaaaagaatctgatgaaagctgtgagtctttctccagaaatgaaaaagtatatgctattatgcacagaattttatttaggatttcaaagggttcacaagtttaaatatgccccaaaggttaagcatccatactctaagtaaatttggaggccaggcacggtggcgcacgcctgtaatcccagcactttgtggggccgaaacaggcagcttatttgaggtcagtagtttgagaccagcctggccaacatgtgaaaccccgtctctactaaaaatacaaaaaatagccgggcgcagtggcacatgcctgtaaccccagctactcgggaggctgaggcaggaggatcgcttgaacccaggaggcagaggttgcagtaagccaagatcctgccactgcactccaacctgggtgacagagtgagaccctgcctcaaaaaaaaaaaaaattggagagcagtccccactgaatgcattgcccttcctctggccctcaagtacattccaagcccaccagttccctcccttgcacacctccactcagatacctgttcccaactctagggccagaaacaaaataagaacatggagaatgggagacattcaccaccaccccaactccccccaacaaagatcttcagaatgcccctctccaccttcattctgaccaaacagcaatgatccgtttcaaaattctctgaaatcccatatcaaccccaaatacccagagagcagcataaaggaaaggcagtagaagctcaagggaggcaagagaggggaggtatgggatgcggcagcagggtagaggaggcagccagaactgcaaggcaggcagaagacggagcggagtagacaggaagcagtcccactgacagggaatactggaagatatgagaacaactaagggacacagaacaaaatgacaaacacttggaagcaagaatgatgccagggccgaagaaaattaaacatggccaacatggctagaaaacaaactggacaaacaggaagtggctgaacagacaggaagcagtgaaggaaagaggatccaggaagtgaaccttcaacaacaacatggctaccgtgacccagagagaaaagaaaggcacaaaacaggtagaatgtgactcctgcaaagggaatcatgacagtgaagggtaattcttccagaaaacacaaacatcaaggctaggacacacaggaagtagccatgagaaatatcgaggcccacaatggaaactttatgatttaaatgacctgagacatacaggaagtggcttattgtcaaaggaaattgtcacaagatagcatgaaaaactagagccagaacagaaataataaatcctttgcagtccaacctgacacagttaccaagatggatgccacagctggagaaggcaggaagggacagataataagtggcctgtaggttaaaaaaaggtgacataggaagttagatcgtttggtagaaacatgaacaaaaaattatttcaccaagaagaaatgatagagaaacactgaaaatggacacaaggtagtagtttattgaccaaaagctttatgaaatccagcttcagttagacaggaagtgatcaagaaagacaggaagtggctacatattttttttttttaattcccaattgccctgagcttcagaagtatccacaagagtcacaaggtaagacatttggcaaaggaaggcaggtagtaatcttttcaagcaacatatacatcatatgtgaacagaaaatgacaagtcacagatgggaaatagctcacagccaacagccaaggatcgaaaccaacaagaagcaattcttgtagctcccactggtagtcaagaatgaaagagaagctcctttcacttacggctcctgagtgggctgtctccgcagagagggcagggccaagctctgtctcctcacgataatcatccccatagccataggtgtaatcgtagggcccttcaggggggtctgtgccaccctccccatattcctctgcctggaacctgtcggctgtgggggggacctggagatctgtctgctccttcccagggatggggagggagaggggtagatggggatgttagggctgagaggaggcttaccctggaccccagggtgtgacaacttctagcccaaaggattccaaggttaatcagaactggattttttctcccaagaatagccatgggagtggttgtatataaatggaagggccatcaaaggccaaaaatggggagagatgtccagaaagtgggtccagtgggaagaagtggtggataaaatgaagggtggccagaggactggatgcagagtggacagtccatggacacaatgacagacaaaggagtccaggaatgaccaaagagatagggaagacaaaaggtgacaacactggacagaaagtggctcccgggaacagaaataggacatagaaagtaagaccattagacaccaacatggagacgaagtcactcaggaatcaaagaatcatggaaggaggcctggatactgaagggaacgggctggacttagagagtcaagcaggcccatagttctagagtgacccaaagacagaggccatcgatggaaatgaggaagaaccctccggccagaggaggggctggtccatcaagacgtcatgggctgaggggagtgagtcacaggtgcccactgcccccagatggggtgagggtggggcatagagttacctcctcaaggggtggcaagaggctcgactccaggatttcttcctcttcacctggggtggggtcctgaccccaaggagagaaggagaagagtagcacggggtgggaaggaaggagaaaggttagcagaagggaggcaaagcagcacctgtcccccgagggcagggtctgtctgtgctgggggatgggggaaatctcagatcttgcagcccctttggagggggatagtttggggagagtgaacctccaaggtcatagaggtttgggggcagagatctggatgccccggctctacctgccggtaactgctgcctctggtcctggggcggggccaggcagtgggggaagctgccctccgagctgggcatcgggaaaggggaggctgctcccatgctgggtcaaagcctgcagttggagagggcctccggcctggtgagggggacgcctgccaggtcattgacctcttggcaggtggggtaggctttcagggaggggtccgatgccccctaggggaagggggaggcctgtggtgggggctcccagggcgctgcagcagagagacagggagggggcaggaactaagtaaatccccataatctaaacacactgtgcctctccccacggcatgggggaggggaggaaggtgtcctaggagatgattgctgggggtgctgggagaaagggaagaaatgaaggggtcccttgagtttacctgataatcaggggttgtccccgtagtcatcacatcataataggggggctcgtagtcatagtagagagactcagtgggctgggattggggggtgggcatagacaggaaggggatggggtaattggaaggtgtggggtgaagggcgggagagggagatataaagatggtgtgggagttgggaaacgggggaggtgtggagttgggaaacagagagttgaagatgaaaggagaggttgagggtcaggagggaggtggggagaggtggaacagagggaaggggttccacatgtggggcagaagcagacatgattaagagattgaccctctgatctttagaccactgaccccagagcctatctgtattctaactctccagaccccatccaacccaggctcccttcccttcccttcccttcccttccccctactacctccccttttcctgcccctccaggtaggtgggggccagagactgggttccccactcccacacttctgcagacccacccctcctttgatattccctccatccctactccttcccattcctcctccttggtctcaccatcccgactgctttctcctggcttcagtcccctctcctacctgcctccccagctctcacccctctcccactgtctcccaatctcttaattcaaagaaggaagggaaaacccagggacacagttccaggaagactggaagaggagacgcagagcagggaacacagctcccagccacaaattcttcataacaactctttttatttttagatgaaaataaaaaggctgatgaatgaggactaggaggagggggtgatgggaatagggagatgagggtggggaggacaactaaggaggagagatgcctgggtgtcttccctctctggggtgtgctgcacttgggggttctcccagctccctcacctggctctggggttcctgattttgtggcctgtgaagtcttgatggttgctgctgtggagatctctgggctctgtgaggctgttggttttggggtctttccctctggcccccctcgcattccagctccttctgttcacatgattcataggctgcctggacccctgggacaatggccagctcctggacatcaccctgcaaagacatgagagagatggagcggagagattcagagagaggcagagggtatcatccgggagaaagagtataggaggccaatcctaggtaaaaccctaagatgggagaaggtcactgtcagtcctccatatgcatagcccttttcagttttcaagggatctcataggaccttcataacaaccaggaaagttggcagaacaaggatctttctttctacccatttttcagatacgttccattcagaaaagcccaaaaaggcaatgactgccccaaggtcacccagagtggcagaatcaggaccagatcccaggccttccagaattctttgcctcccctctgcgctttgtggcaatgcatgagcccttccacagtggcttccagagacagggctcagctttagatgccttggccttccaatggcagtgatgatgagaattctctggacctctagaaatggagtggggagaacccattcctgagttccaatggcatttacttttgcccacacatggtgcttagcatactctccattgcaccgtaatttagggatgttgtctcatttccagagcccacctgggagctcttgggggtgatagagactttatattctcttctttgttctccttgtccagcaggtattcagaaaatgttgactggcttggagggtgaatggagggatgggtgaatggagggatggatgaatggatagatgagtggatgggtggctgggggcttacatgcattaatgaatgggagcattgataaatagtgaatgaataaatgtacgtatgggagggtggactggtgggcagatgaacaggggttacagagtagatggaagcaaatgggtgaataggtagatgggtgaacttatgtgggtgaatgactggtcggatgggaagtaagtgggtcaggagatgggtgagtgagtatattgaaggagggagtggttgagttggtggaaggataatggatagatggtggctgaatggatgcatgcatccttgtgtgcatgggtagatggggagggtgggtgggtgagtgaatagctggatggaggagttgaagaggatagatgggtggaagcatagatgggtggtttgaaggggagagtggttaagcagggggaggattgacaggtgggtggatataagccttcatgcatgactaggtgggcgtgtgatgcatagatgagtaaatagatgggggagtgggtggtggatgtgtgcataggttggctgaggagtgagtgaattgatgggtgggtgaggagagagaggggttgaaaggatggatggatgagggaactgatgaagactgaaggacagagtaagtggctgtggacagtcctgccatataggtaggcatctagttctcctgcagagaacagtagccctgaagatagaaaatagaaatgaaaattcataagaaaaaaaaatgaaggcctagggaataggaagatgacatgctggggccagaagggtagtgggcacaagataggggaccagaagtcaatcctgcctctgattgctctggttacctcaaagacttcttcatccagaatacgggcaccaaagatgatcactccatgggtgtccaatactggacgagcacttcgggggagaggccgggtgactcgcttcttgcagtcaacaatgagggtgacagactggcccttcacagccacagccacacggtgccacctggaaatggtggaagaggttcaagtgaactcttggctgactgaagtaggggagtcaacatggttggagagcagtgataagagttgaagccaatggtgataagagcagtaataacaatggctaccatttattgagtgtttacagtgcaccagacaccatgccgtcactttcttatttgtgccaattctatttaatgtctattttacagatgtagaaactgaggctcaaaaattttaagtaacttgcccaaggtacaggctagttcaacatgcagagaaggctgtacactctaaagcccaaactctggactagaagtgactgaagtttgggcagtgggtaggtgtggtgtggcccaaagggtctcaagggtttcacagtttagagtgtaggggtttgggggcacttcctcctgaaagtgtgggccaggcagaccagaggagcaaacaaacttacttgccatctgctaggctgaggcctcggaagactggctgagagggaggttgaggccgcccagtctggtcttcatacaggaagcggacaggtcggcccagctccaggcccagctgtcggacaccctgggcactgtagagagtcaggaggggagcttggagaccagggcgggtccggacaacagtcagcagagagaaatctttgggaaatcctcctagtaaccgagagagatacacacagagtgagaggcaaagggagccgccacaacccctttcctcctggtgtctgatcctaggccccatcccattacctccccccaggcctaccccaccatgtcacccatacctgggaaaagctggcgagtgggtgcactgagctgggcaggtcgtgccactcggtaggccacatcagctggacagatgcctttcgctctccggacaccatcagggagggaggggaacctcagggcccggagcacatccacagggggtgcacctgggagagtccatgattatcaggagaagggacatgccctcaggagggcataaataggggacatttgggatctagaactcagctttccagggctcaaactccctgcaagggaaaggtcacctcaccctcacttgcttctgaacagtacctgaatggatgggaaatgcaaaggtacctggaggcagggcagcatcagctggcattcaaccccatgacactcctgcccctgtctctcctagcatctgcctctcttacgctctctctttgtcttttagcttatgaatctgtctctctctgtactctctgaatacttctctcaactcttcatctgtctcctgtctctctcactctcttactctctctgtctctttatgttggtctttctgtctctgtctcttctgtcttcctccatttctctcacattctgtccatctttttctctccctcgctctcactctctttccatatctctcactctctgggtctctggcatctgtcccgtctccagcacaaacaacatctgggcaatcgatcatcctggacacaggaggtgcaggggggccacgaggaagagatcagagaagcagctctatgagaggggcttcaagcagctacagatcccaggtttgggggatggggtgggaacaaccctgagcatgctgaggaaaaagatacaagaaagctctcccaggagtctgtgcctcctggtttaggagatgagttggggaggggtggaggaatggggggcaggggctgaagctgccacgaggagccggaacaggtccagggccctgagccacacatctgtggatcccatcagagtgcttgcccagaacccaggcaagctccccacacctggaacctcaatcctgtctcaccacccccaccaaccccaccacctgggacccaaagattcaagatccagcccaccagccctgtctaactagaactcagcttcctagggctcaaactccctggaaaacaaaagatcaccttgccctcacttgctcccctatacacatactcttcacaccatcagctccagattggaaaaatcccaaagagagttccagcaaaactttcatagaagtgtggggcagggcagaggccagagcaatcaggagagtggagctgggtggggtgggtgaggtggggcgggcaggcagagaaaaggccctttgagtccaggagccgggaaaccacggccttcccccccaacccccacctaagcctggcccctgcgcgtgtggcagctccgcaaacaccaacacacaagggccgctttgagagacgaagggtgagtgagacagagacacagagactcacagagaccccaggccaaggagacctcggaggtccccaccctccaccaaatcccaagggagtacaattcgatcatatggacaacctacccacaggtccgcccaccatcttcccacaccaggccacatacttgcccccctgtatccagcctcatctgccccacaggctctccactggtagccccattaccctccaccactctacctctggccccccaaatgccttattctctaaccttaggaattctacagtaactcatttccctaaagtcccatctctacccactcagcccctgaaataagaaacagtcatcttagccatccccctgcctccatgccagaggatccctcttccccctaagaaagactcctagagtctacaggcaccatacgcctcaatttcctggccctgggcttcactgtcctcacatcttggaagttcttccttctgtaatctaatctaaatcttttgtgctgccattctgaccattttctctctaaagcagagaagaattgaatagtcaagttaaatataaatcagccctcagtgtctccagaaatgggctttttccagcctgctgaggacctggtgctcacagccccctccttgacatcaaatcccctttcctagaagccaggaattctgggtcctgggaaaaagaaggaaaagatcagggttgtgggcaccagggtcccaggggagcctggctggccagagggaggaggggctaggcaggaatgcaaagagttggctctggcctcagacacctgatcctggcctgtccggagggccgtcctgttggcagccagccccagtgctccccagagccagctgcgtggcagcatcgagggcacagggagggggagggggaccctgtccaggaggccaatgagacaggtagtcaaggcttcctttctttctgggcttactgggctctgctctgaatcacaggtgctcaccccttatcccagagatatcgacagaaaggccataagacacacacgcctcacccatcaacattggcgtctaccatccccacaccagcaatgactggaccgggctggccctggccatcttcagctcttcccaaggactcaagacaagcatccatccccattcagggtctctaaagtggtcctccacctttcagccctatctgccctcccccagtcacttcaaggacaaagagattcctaccctgatgccaaggaacacaggtgtcctgccctccagcctgtagccttgaagccccaaatctccttgttagactcagaagctgctgccccaggcatcagctggccccttcccagagacactcagagctccagcctgactccgaggacccaggcatcaggactcctcttacctgcccagcctggggccgcgctcagccccagcaccagaggtaggaggaggaggaggcgatggcagcggctgcaccgctccatggctgagaagccgaaacgccgggtcccagggacccaggtcggcctgagacgctggatgccctgaggctgacagaagacagggagcagactatgagcctcagacgccggggtcccagggaggtcagaggctgcgggcagcgacagctgtcagcggcccagctccatgcagcaaggcgccgtcggggctcccggcactgctccctcctcggtggctgccgcttctgtgtgtccccggccaccctggcgcccagagcccccacctcgcccccgcccccggcccggcccccgcctccagccgcccgcccacagccaccgaagggaaaccccaccctcagtctccacctggggagggaggcgggaaccctccctctatcgctcgctctctcctgccccttgtaggtctcaacggcctgtaccctaagattctcttttcgggaaccccaatatcttccctagccccttccttttctaggacccaaacgtccagtcacacacactccctcccattccctccctcttgggggcccagagccccctttcagcagaggcctgggcgggatttagggcacagtgggagggggagaggcgggcctgggggtcgcagtccccaccccacccataatcaggtctccataattacttccctcaccccgccccgtgtaattacagagccgggccggggcgggggtatttatagacaaggctatagatagcgacgaactggggcgggggatgtgggggaaggtgttctacggagagcaagaggccagagactgggacccaccgacaaacacaggatagtcaggtccaaggagatgcaaatgggggacgcggttagggagtcccagagccgaggtagagggggagcagtggtaagatgagcgagcagtcgactctggttggaagggtccagggaaatggggtcactcggggacgtgggccgcctccgggcgggcaacgcctgagaagcacgcagcgctcggcgcccagtgcgcccccacgagcgggcacggcgccgggtctgcccggagcccgcagcgcgcccggagggaaggccgcagcgagccgaggcgccgccgcccgctggcgcggagagggcacgagcgaacaaggcgcctttgagaatccaccgcccccccttcctcctccggccggccccgcccccagcctggcacaccctctccccccctccccgacaaagcttgccttgtgtcccccaccctgcgtgcacctcttgggccccacggaacctcggcggcggcgtccagggatcgcgtccggagctcccaaccggataccccccccaagcccgaaacggcgctgcccatcctcatacagtcacctcagtccagaaaacagcgattttaatttgaaagcgattttatgtatgagaggggaaaggagccccaaagagaagggacgcagggcaaaaatcatgcagccccagcaccccacctctgcgggctggccacctcccctcaattctcaggccaggatcctgtgtccccagcctatgctatgtgcccagggctggaggagagctgtaaagggaaggcctccgggactacactcgtgaaaccatcccctgtgggggccctgtcctcacagcccaggccccttccccaagttagacaggaagagatagggggggcggcgggaagctgggaaggctagtgcttggagagccctagggacaggccatttcagggccctgcctttcccaaacacccacctccaccactggcatttcttagtcaacctgggaaagtacagtacttctttgagtctaactgcaagtctctatcctcacaggaaattaaaaatagcagatcggttcctacatctccaccagccccttcaccaccaccaccaccttttttatatttcagtctgactgcagaaggaggtgaagtgtaaaaagagactctggacagtgacagggcccctccctcttccagagaggcccccatctgccaggtttgagaggaggaaggcctgtcagggccctactctcatgtccatcagcttgggaggcctgccccccagtatccacctctgggggagttccccatttccactcttcagatgggaagcaaaatgaggcaagatgagaaggaagcaaggtcctggaggcaaggccagtgctttgtgctgggggaaggacagagggtgagaaatcaccccaaatcatgggagaacccgacaaattcagagactcaaggccaccgaagagagacaaccagtcctcacaggtatctggggtcccttccaacttgggatatcaagcagatcccttggagggtttatgttcttggttctgccctgtacttctcaccccatcaaggttctgggaacatggccccccaccctgccccagggcttggagtccctcttggatgtgtgctcctccagtgtgagaagcaccacgtctgggtctgagctcaggccagttgatggggagcctcaagcatctccatgaggaaggtgtcgatgggggtgtcaccaatgagcttgaagaaaaacagatgctctagacacttaaggccaatggaccggagggcaggaagacgtagcagcagcttggcaaacctggggtggaggtgggagaaggggattgagagctggaagcacacgggccctgaacacatcctcatagcactccccacccccaagggagcctcagtgccccccagccccatctcaccgtccctgctgctcagggtacttctgtttgcagtaggtctccagtgatgcatacactttctcccgcaggacctccacctcactagggttggagaggcccttggcatctgggatggcagggaagagaggaggaagagaaatgaagacaaaccaaatcaggatggccatgcagatgtgagccacaggatgccccttttgggctgcacttgcttgccctttaccagaggcctggcaagggaagcagggcccactgggtttgtgggatggatccgtggatgtgggtttttcctcggccagttgggagatttccaggttgagggtcttactgagggggatagctgggtaacttaggagtctcggagaagaggaggctccaaggttgccttggccttgagagacaaaggtaatcctcctcttacctggattaaacagaatgattgccctcaggcagccaagctctgtcttgtccatcctcatgtcacgcattttggacactagctctgtcagcaccctggagagggacctgcaggtcactcaaaggtcacagctcagccagccttggacacggaccagcctatagccccaccccctctatctacatgccagcctagccgagggccactgaccgatcaaagatggctcctactcctgctgaatgggctgagttgcggtgcacgtgaagacctgtggcaaggaggatgccatctcgaacatcaatggatcggtgtgagaaggaggcaatgaggagttcattccagcctgggtggggcagcaagggtcaggagccagaaatcaggccaagggattcaaagcacatcagtggaagagaaggagaaaagaggtggcgaggtcagcaagtttggctccctgggtacgcaaggtaaggccactggggtcactaaagatcgggaagtcaaagaggggtcaaatgtcaagaagtcaaagggatccaaggtcactgacctgcccgcagcaatatgacctgatcatccagaggcaaggaggaaaagtgtgggatcctcttcgcccactcaacaagcgtgaatagctgtttgtcagctgcctgacagatgttagtcacagggtcatttggctgcaggggacgggggtaagagttatggaagattttgagatatgctgggagcccccttgtaagaggcttttgacaccccctccttacatatagtcttcctgtgagccccatccaaaccaatccctgtaagtgagtcttctcttctggcattagtgcaaacaattatttatttgggacatgcctatggttctgccagtgggttgtttggggagtggagacagaaggagctatcacatccacctcagatgtttgaaagaccttgtttggcagcacctccagtcccaagtagtgttaggaaggttatgaggggaaaggagggggaggggatgtagaacagacctagactgcctcccccaacccccatcacgaaggagagtggattgaccccaacactcacgctgctgccgctacccccggttcccccaggaccctcaacgccctggtcactcttctgttccacagcaagctctgcctccaggatcctgtccacaggcatctcctcgggggctcccccagccccctccccatccccatccttgtcctttccccgctgacgctcctcctgtaccgctgcagggggaagggggagagaaaaaatggaaagtcagcagccagccatgaaggggttccacaaatatccttacggcctcatcaggatctcatggcccttgggagatatttataggaattggggaagtcactagaaagggtggactgggggcagccctgaaggaagggttataaaagggcaggtaagtcagtcgggaagggtgaggtaggtaaaagaattagggaggaatttaaatggagagcctactacatggttaaaaaaaacatgccaagattcaacctgagaaagctgattgaaaaaaaaaatttttttaaataaaatatgccaagaaacatgctaagcacattttaccattcactcaattatcataatgatgctggaagcatttattctcatttttaagatgaagaactcggggttcaaagagattagtttgcttaaattcatataatacatggcaggtcatacaactgactctaagtgtgtctgagtgcaaatcttgtgctcttctgactcaacaaataggcagtgaaaggagcactggcctaggtctttgaagatgtgggttctgatcccaaacctgcctgccactcctttgttgcatgaccttgggaaagccaagcctcaggctcatcttctctaaagtgggtgttttgaccaagatatgctctaaagtgtctctcagaatcctaggaatctgacttaagaagataagatggagacacagaagaaggaagggaagccctgaggtcttcagtaaagtctgtaagcttaagagtgcccagtcccaggagttagaggaaagatcacagataacaggagacagagaccagagaaggtccatggaatcagaggaggaaccactcaggttagaaatggggagacagcccatcatggctaaggaaaagttatcctatcctaggatcagtctagggaggggtcatatgtgcaggccacagaggcctaaccattaagaaggaaactcaagggccagaacagggtaacagggaggagagctgcgaagggagagagaaatcaaatatcgccctctagaggagagagagcagtccacccttccagagaggtacacagtctgagtgggataagggagaagggcatgtggtctaagacgcctgggcagggcgggtccttaccctccctcttcatgccagtggccaggcacttctgatagcggcagtactgacagcggttccgctggcgcttgtccactgtgcagtctttgttgtcccggcaagagtatgtaaggtctttgcggatggtgcgtttgaagaagcccttgcaaccctcacagctgtaaaccccgtagtgtttgcctacagggaaaggggaggagcaataagaaggttgcatggagacaccttcaccatttagtctgtttccaatctccccctagcaaaacttaaagtcctccctgtttgccaaatacagagatagggaaccaggagctgagtgatgatccagtcccagtctcctcactgttcagaaaccctacacgctgcttccttttccctctgaccttccccccaatcgcgtcctacatctcagcttcagcttctttactcccatcaggcctcccccaggtcacttgctctgaccaaactccataagccctgggaatcccacaggtgatgatacatggcccagactctccctctctgttcatcctctgagccacatacctgagcttctgtccccgcagattgcacatagccgtttgccagccccagggccacctggagggggtggacagtgcaggccccggacccctaagactggtggcttcacatcttcaggggggccagacccacccccagggagtgacactgttgagttaatctgggatgggggaaatagggaagtcacaggaagacttattgggaagcagaatgtcacagaagtgatggaaatcattccctaccactaagcaaggccctgcaatgcacattccagaggctgtcatttacactgcagtctatgtgaaaggccatccctggagcacaaccccaaagtgaataaacaggccccccctgaaattgtgcaacacagtgaccctgaagggcaggtgtcttgggaaagcagatgggatcaaaagggcagaaaatcagatagatgaaaaggacatcaagaatatcagaattagccgggcgtggtggtaggcacctgtaatcccagctactcaggaggctgaggcaggagaattgcttgaacccaggaggcagaggttgcagtgagctgagattgtgccactgcactccagcctgggcaacagagcaagactccatctcaaaaaaaaaaaaaaaaaaaaacacacacacacacacaaaaacaaagaatattagagttcttttaggggaggaagcatgcactgaaagatcagtcacctcaggaaaggcaaggggtctcataaagaccacaggcctgacaaggttagaggattggaaggtcaatgggccatggggaagttcacacaaggatctggggttacaaggaaaacaagaaaatgaaagtggccaggcagtaagttggtcacaacctctcacctgggggctgctgacaggcccggagaatcctgggggagctggagggggcagaccaggggaccccatggaagaactgatgactggaaagggagagcccagtgggggtggtggcatcgggggtgggggtggggccccagagcctccaagggatggagctgttgaagggggtaggggtggcccaggaggagaagggggagggactccctggggaaggggatttggggaggagctgtctgggcttcgggagtctgagggaggggtatgtacaggcacacagacacacaagagacagaagagacaaaaaaagaaaatgagtcttcaaacatccaactagagactttaattctctaataccccaccgtgccggacccagcccactccacccatccccaagttcagagacaccctgctgtcaaacaacagtgtaactccggctggtccgatggtagtgggttatcagaacttattaacatttgtgtcactaaaattggtatacaacctcccactgctatatttgactggctaaaaaaacccaaaaacagcgtaactcctcattgtggtgagaggagggagttgacaaggagaggaggatagttcaggtgaggaaaattttccaaccaatccatttgaatgaataccaggtcatcccaaagccacacctgtctcgtgggtggggcagcacgtggggtagaccatcgagcccctctattcccagcgtaaagccaggtagccagagcgtgcaagggaaagagacaggcaggagagacccctcctaagacgcaggatctgcctgtaaacgcccaaagtcctgaggtttaagaggaatcgtgcccttcccaggcccgcgacctccggtgcccaaggcctcaagcggtcacagctaggagggcggaagctccccttccccgccccgccccgggggggagggtgctaaggccctcgggagggaggggacgcgtgtttacaaacaagggggcgggagcgcaaggaaaagagcaccgggggagggtgtgggggaggggtcgcagataaagcggtcactggctcgcctgcccttctgctggggcactcaccccgcccgctgtcgcccatcccgtcccgtccagcctcccctggctccggctccggggtttgttgttctccgcctgccaccgccgccgccgccgccgctgcgggatccagccagggccgtcgccgccgccaccgggacgcgaccccacaatgcatttcttttcgcacccccaccggcccacactgccctgcggcatgccgctgagggaggaagggcgggcgagcggcccaagacatgatccctggctgagagtagggataccgaagaggtcccagggattcccaaggattgatcggaggattagctgagcacgaggaagcccctgagagaaagactctggcctggattgggtcgaattaagcccgtcgctctgctcagtaccaaaatgacagcgccaatgtggcagccatctttgtacagacgggaagtctcggcgcgagttcccgccccctcgtctagttggaaaccgaggaggcggtctcctccggcctgttagcccgcctcgcccaccctcccctcaaatcacctccacactcgcgcatgcgtgtcagtgcaggatggattcgtcgctaccggagtgccgccatattggtaaaggcattagggcgaaggtggaacggaacttcctgttctcgcgggatctaaaggcgggactgccacgtccaagcaaaccgggaaaggagaggatcccggagccggtgagaattctctgttttttctctaccatcctttccaggccttttcctcacctaatgagtcgtagagacgagggcccagagagtctgtaaagtggctggtgaaagattagtgtcccagggccctacatccgggaggtggttcgggataaagagaactagtcttgggaacaatgtaggtgggaacttaagggaatgggagagcggcccatagaggtggacggagggcgcgattggagtaaagcggaccctgtgtaggtatagagttgagtcaagtggagtcactgcctctgtccctctggtcagcgtgatggccagaggcctgggggccccccactgggtggccgtgggactgctgacctgggcgaccttggggcttctggtggctggactcgggggtcatgacgacctgcacgacgatctgcaagaggacttccatggccacagccacaggcactcacatgaagatttccaccatggccacagccatgcccatggccatggccacactcacgagagcatctggcatggacatacccacgatcacgaccatggacattcacatgaggatttacaccatggccatagccatggctactcccatgagagcctctaccacagaggacatggacatgaccatgagcatagccatggaggctatggggagtctggggctccaggcatcaagcaggacctggatgctgtcactctctgggcttatgtgagtctccaggggatgggagagagaagggctggttctggattgttgggaaactccacagtacttgaccttgactctccctcaccaggcactgggggccacagtgctgatctcagcagctccattttttgtcctcttccttatccccgtggagtcgaactctccccggcatcgctctctacttcagatcttgctcagttttgcttccggtgggctcctgggagatgctttcctgcacctcattcctcatgctcttggtaagtaacctctgacttctacctcaaatctaacctatttcgttctttggaggaaaagggttctttctcctttatgatccctgacctttcgatattcccccaaatacacactcattgtgtcagatattccctcatctggttttccccccttcttccagaacctcattctcaccacactctggagcaacccggacatggacactcccacagtggtgaggaagagacagatggggatgggagttggggtgctggggaaggtccgtctctccctattcctcacctcccgcacttgaggaggaggagtctggaatgcacatctcccttaatgtctcaatgcctccattcccaggccagggccccattctgtctgtgggactgtgggttctcagtggaattgttgcctttcttgtcgtggagaaatttgtgagacatgtgaaaggaggacatggtcacagtcatggacatggacacgctcacagtcatacacgtggaagtcatggacatggaagacaaggtgagcccaggaacaactttcctgaaagctgacttgcctgcctcagaatctcctcatcttatggccctcaggagggagaggacatgttggaagatctgttctccactctgaccaactcttttcttccctcagagcgttctaccaaggagaagcagagctcagaggaagaagaaaaggaaacaagaggggttcagaagaggcgaggagggagcacagtacccaaagatgggccagtgagacctcagaacgctgaagaagaaaaaagaggcttaggtaagggccagagttggtgataaatttgggcaagggacatcatcacaaatcacatggaatatgtgctgtgggtaatggcaggtatctgagaaacactaaaggactgggtgtaaagtggtctctgaggggaggtgtgagaatagctgaccaagactggaacaagtggtgatggaagcctctgatcattttctcttcttgtcctgtacaagacctgcgtgtgtcggggtacctgaatctggctgctgacttggcacacaacttcactgatggtctggccattggggcttcctttcgagggggccggggactagggatcctgaccacaatgactgtcctgctacatgaagtgccccacgaggtcggagactttgccatcttggtccagtctggctgcagcaaaaagcaggttggtgatgtctgccaaacacagctgcctcaaaccctttatctctcctcactcaccctaaacccaaacagcctcttattagttccaaacaattcatactgtcattgacaagtcctctagaaatgagggggaagaagttctggttactttgtcctttagctcagtatttcttaaactggtctataaaccatctgaatggtttagtggagtcttacacacacacgcctactcaatcagaaagtctgtggaaaggacctctgatctcttaagatttttcagaaattgtctattctagactgctccctcttctctttttattttgatgtttagtttccaaatccatgtcccctatacctataccccaccagccacttctaaaccactgataatctttagctattggtgagtgcctttttctcttttctgcccatcaggcgatgcgtctgcaactactgacagcagtaggggcactggcaggcacagcctgtgcccttctcactgaaggaggagcagtgggcagtgaaattgcaggtggtgcaggtcctggctgggtcctgccatttactgcaggtggctttatctacgtagcaacagtgtctgtgttgcccgagctgctgagggaggcatcaccattgcaatcacttctggaggtgctggggctgctggggggagttatcatgatggtgctgattgcccaccttgagtgaggggtggataaactacccctgccccaaacctctacccctaactccaggtcaggggtgcgtagaggttgggggccctggccagggacatctgccaaaggaaggaactgtagcctgggagaatggttactttggcattagggccttcaagggctggcagtcttacagaggctggagcggtgagaatgagaggccagagggaccatagtgttgggcactgtctgaccatgttgcatttggaaggctaaatggggccatgaagaaggctggaagggacagggggtgatggcagcctacctggtgtcccctaccccacctgttctcggagaaccaagttgctacacaggaagttctccaaggtccagtttcctttctcccaccagttggtggaggcttcagggaagaccagagtcctggacagagagggtaacaggaggagtcggggataaacatcaaacatcaatcgtgtgtcctgatttgggagtgattggggggatggggtgggagagggttagttggtattctcatggcctgattttttttgtttctattccttttatatcactgtgtttgaatcgagggggaggggtggtaaccggaaataaagacctccgatcttccgccccacatgcagtctttgtctttttggggggaatggggccccttgtcttctccacacccggggcccctaagcagcagtgtcgggccacgccccctcggtgggaggtcggcctgcgctggtggccgcagatggcctaaggctggcgggcctttgattggccccggctttgcccttgccacgcccctctgcgctgggattggcttagtgctgggattcccacccacccacagcccgccatggcgtctcagctccagaaccgactccgctccgcactggccttggtcacaggttgagggggttctttccccgggcggtttggggtattggagtgaggtcaggggcgtgcccttggagtgcgcggccgctgtgacctctggccccttacccacattttactttctgccctgtgacctctgatccctgccctctcctccccgtgcccggtccggcgtgttctgtcctacctcaggtgcggggagcggcatcggccgagcggtcagtgtacgcctggccggagagggggccaccgtagctgcctgcgacctggaccgggcagcggcacaggagacggtgcggctgctgggcgggccagggagcaaggaggggccgccccgagggaaccatgctgccttccaggctgacgtgtctgaggccagggccgccaggtgcctgctggaacaagtgcaggtgaacgctaggccactttccccctctaaagctctgatattgcctccactgccccggctttttgtggggggtttttgatgcgtaacctccccctcccataggcctgcttttctcgcccaccatctgtcgttgtgtcctgtgcgggcatcacccaggatgagtttctgctgcacatgtctgaggatgactgggacaaagtcatagctgtcaacctcaaggtggcgatctctgaacctgcgacgtttggcccccttagcctggggagggagttggaggagggctgtcaccccagctgatcttttctcccttgttaccctttcccgccagggcaccttcctagtcactcaggctgcagcacaagccctggtgtccaatggttgtcgtggttccatcatcaacatcagtagcatcgtaggaaaggtcaggttgagttggacgaggtcagccagccaagtggtatagagaggagaacccctccttgagactcctgactcattccacatctctgactcacctataggtggggaacgtggggcagacaaactatgcagcatccaaggctggagtgattgggctgacccagaccgcagcccgggagcttggacggttggtcagatgcttgagggtgctggggagcacctggggggtctgagggaggtaccagcattcagccctctccagaatcggcagccactctccttcccacagacatgggatccgctgtaactctgtcctcccagggttcattgcaacacccatgacacagaaagtgccacagaaagtggtggacaaggtaggaggctgtgggtggagggcagaatcattcagagactcaatctctctgggcttcacagagagagagagagagagagagagagaatactgggcacagttcctggcaaacattaaatattcaatgaatgtatgagaaatgaagacaaaaaagggtcacagactcagtcttcaaaaaaatccataaaagaagctttcacccacatgagtatttccttacagattactgaaatgatcccgatgggacacttgggggaccctgagggtgagcactgaatgtagtggggtccctgggaagggggcctgaatgaagagatccccaaagtttggggattttctaggggactggtggttggtgtctgtggagaggtttgtggggagggatgtctttggtgggagattatggctgttttgggtctatgggagtgagcagaattctgccctctccccaccattctcatagatgtggcagatgtggtcgcattcttggcatctgaagatagtggatacatcacagggacctcagtggaagtcactggtatgaggccagcatggggagggagagggcagagaagtagaacccagactatatgagaaagcaagtaaggggagtctggagccactgggaagggcagaggttcccaaggccagggacagaagtgggtaccccctagcccatttgtgtctccacccatgcatctgtccaaatgtttctgcccctcccaggaggtcttttcatgtaactgcctcaaggaccctggactctgctcacccccccaccactctgcctggcctcctgctgatgaggactctaagttcccaggatacaaaaggggtggcagtgtatggttcaggaatgctgaatatgggaagcaggggtgcttgtgaccctaataaattccaagtcctcttccctgccacctccggctcttcttgtgtccaagccctcagacccttccccacctccccctcctttccctttcccgaaggattgttccctttctctgcctggtctcccagggcaacccccgccgccgggtgtgagaggaaagagtatgtgtcactgtgtatgcgtgacactccgggtctttttgaagggaggggttcgtgcgtcacccctttccactggttctgcagcaccagtcccctccccccaactccctgggttcttatggtccccaagggtgatttgttcatggccccatcttggtgtccagtctggccttgaaagggggtcttggaacaggtggccctcccccacccctctcctttctctgagtccccccctcccctttctctccaccttacaatagctgcagccggcctggggtcggatgggggggattaggggagggggccaggattaggggaatgaaccagccgatgaaaggggctggagagagcaggagggagggggctgggaagaggaggaggaaggggaggggggtctgcgctaatcgactctggcgcccacataaggactggccacggactgaaggagaggacagggaagtaggggggaactggggtggggggcgagggcacccactgctgccttgtcccagggacaggccaccccctggcagccgcagcccaagtccgggagcctcagctcgggcggggacaagatgcccatcagggtctctaactgccccccaccccctcgccctgtatccctctcattccctacactcaatggggatcgctctgccccttcctcttctctttcctccccatccccttcgtttactctagagtcctcgaagaggcttctgcccacttcccactccagacattctgcccctgtgtaccccacccacacgcgcacccccccttcccaatgggagctccatcttgtgtatgtccctgtttccgcgtggtgtctccattccccctttcctcccgtgcgcctccctcccttccccgccccgggccgcggctcctgattgtccaaacgcaattctcgagtctatggctccggccgagagttgagtctggacgtcccgagccgccgcccccaaacctcgagcgggagagcgggtcggagggtctagggagagccaaagcagagggtggagggagtccccagggtggtaaggggaatcccgggcacatcgggacctaggtgtgttctcaggactagaaggctaaagcggcagatcttttgcagccttttcccccgggatcctggaatgggggttacggagaagtgaggggggttgatccccagagtcgccagggtacgcagagtgggggaggtagcccttttcacgagccctctgtcccctcctggggtcccagatattccaggccccggccccccggagctgaggccccgcgtgggggcctctggaagggaaccgaggctaaggttgttggccgcgcgacggtgctgggccgggggcggagaccgtggttccctaagtggcgcagaactcccgggacgcaggatcctcacgcgggacgagcccgtcccgtgggcgggagaaccgcggcgtccacgtcccgtcccacccgcgccgcgaatggtgggtgacgtctccgccggcggggggagcgggtgtagcggaggagcaggcggaagtgacgtagggccccagcgcccgggccatggcggcggcggtggcgggagctgctgtctgagcagcggttgcggaccgagcgaacttggcccaggagcccgggcctagggagaggcgcggcggcggcgggagcgcgaacggctggagctgggtgaggggcagtgccggcgcgggggcgggagcgggggcggagaggggcgcttctggaggggcggggtctacgcgaggggcggcccccctgacgccctcctccccttccccccacccccagccttcttcgccttctcctcggctgtggagccctggtggggggtctgcgcccggtcaccatgacgacgccggcgaatgcccagaatgccagcaaaacgtgggaactgagtctgtatgagctgcaccggaccccgcaggtgacaggcattctccctttcaggcttaccccctcccccaaacccttatatccacagaccgcatcacacagcttcttttccgtaatttgctctattctgccttgcctggccctacctttgaatcaccttaatctttccaaagcactttcgcatttagctcatttaatcctcaaaacagccctgccagagaggtggaacaagtattattatcttcatttgaaagatcacaaacacaaaaattaccttccctgttcctcattcagtgtcataagtcagtgcacataagactcactttgggagtttattaaaagcagagcttcatgccccccaacattctgattcagtagtgaattgggttctcagaatctgaatttttaacaggcaccctatggggttctaatacaggtagcaccaggactttaaaaaattttgttgaatagtttttcccaaccacagatttgtgccatcttcactcctaggccacttagccacctcagatcctcctattccaaagctcctactcttagttaatggacactaaagtctgtcttttctccatttgctccaagtcatcagtccttctctttctcagaattcttgtctcctatagagaccaacatgggtcttctcactgtatttctcaaaattcttattttatgggctgctgtttctaaaacccctttccctctaacccacaccacctttctactcactgatgccttcaggaagccataatggatggcacagagattgctgtttcccctcggtcactgcattcagaactcatgtgccctatctgcctggacatgctgaagaatacgatgaccaccaaggagtgcctccacagattctgctctgactgcattgtcacagccctacggagcgggtaataggagagacatgtttgagatgagatgaaggggtacaaagttagggccctctcactggtcttggttcagcctaggcttcagttcccttgactgaccactcagggcttcccttctcctaccccaggaacaaggagtgtcctacctgccgaaagaagctggtgtccaagcgatccctacggccagaccccaactttgatgccctgatctctaagatctatcctagccgggaggaatacgaggcccatcaagaccgagtgcttatccgcctgagccgcctgcacaaccagcaggcattgagctccagcattgaggaggggctacgcatgcaggccatgcacaggtgtgagggtcaggagagaagcagaactgatgggatgggtccgtgggtcagtccttgttgcctgctagcttctaagcctcagcatcctaggagctgaccacagactgatcattagggctggaaatcatgggtgtaaattgcagtttcttagtaaacaactggccctgctcttcttaagaaaaatatagggctgggcacagtgactcacatctgtaatcccagcactttgggaggtgaggatgggaggatcacttgagcccaggagtttgagaccaccttgaataacatagggaaatctcatctctacaacaaattaaacatttagctgggcatggtggcacatgcctgtagtcctaccttcttgggaggctgaggtaataggatcacttgagcctgggaagaaagtggatgttgcagtgaaccatgatcacaccactgcacactgcactccagcctgctgggcgacagaacaaggccctgtcacaaaaaaaaaaaaaggaaaaatgtagtttaccccatgactttctagaagttagaacagtagagcgattttgagaataagccccggattcatactgctggaagttaaatcacctcctaggccagcatctctcagtctttcatgtgtatccagattacctgtagatcttcagatgcaaactgtgattcagtaggtctagagttgggcccgagagtctgcatttcacaagctcacaggggatgtgtatgctgctaccgcactttgagaggtgacagcctatgatcactaacaagttacttaacctctctaagcctcagtttcctcagccataaaatagaggtaatataattacctgtgtcataggattcattgtattaggtaaggggattggtgcaaaacacttagtatactgagtgcttagcacattgtgtttaataaatattaggtatcgtcattaggatttttcttatctcttaattctctgaagtttaaagtctaagccctttatcctggatgccttctaaccttaaccacttgcttctacagggcccagcgtgtgaggcggccgataccagggtcagatcagaccacaacgatgagtgggggggaaggagagcccggggagggagaaggggatggagaagatgtgagctcagactccgcccctgactctgccccaggccctgctcccaagcgaccccgtggagggggcgcaggggggagcagtgtagggacagggggaggcggcactggtggggtgggtgggggtgccggttcggaagactctggtgaccggggagggactctgggagggggaacgctgggccccccaagccctcctggggcccccagccccccagagccaggtggagaaattgagctcgtgttccggccccaccccctgctcgtggagaagggagaatactgccagacgaggtgaggagccctgtctttccccagccactgagaaaccaaagatcacctagatttccatcagaagtgggctttgcccaaacccaaaataccaccccaacccagaatccattttggaaagcccctacctccagtcctcatctgaggcgctctggctctaagcctgtcctccctcccattccaggtatgtgaagacaactgggaatgccacagtggaccacctctccaagtacttggccctgcgcattgccctcgagcggaggcaacagcaggaagcaggggagccaggagggcctggagggggcgcctctgacaccggaggacctgatgggtgtggcggggagggtgggggtgccggaggaggtgacggtcctgaggagcctgctttgcccagcctggagggcgtcagtgaaaagcagtacaccatctacatcgcacctggaggcggggcgttcacggtgagagcttctgagggcagtggtagaagaggggagaggagggagggtggtctgggccacatagaaccatgagcctggtctaactcatcagcactcttcccctatacatcctctatctctttctatgtcccctctcctttcccatcatccatgtccttttttgccttatcgcttttattattccttttttctttcctcctcccttggtcaccttttgcctctcattcatttccttttccatcttctccaactttcctctctcttttcccctctctcccttttaccccctcctcagacgttgaatggctcgctgaccctggagctggtgaatgagaaattctggaaggtgtcccggccactggagctgtgctatgctcccaccaaggatccaaagtgaccccaccaggggacagccagaggaaggggaccatggggtatccctgtgtcctggtctatcaccccagcttctttgtcccccagtacccccagcccagccagccaataagaggacacaaatgaggacacgtggcttttatacaaagtatctatatgagattcttctatattgtacagagtggggcaaaacacgcccccatctgctgccttttctattgccctgcaacgtcccatctatacgaggtgttggagaaggtgaagaaccctcccattcacgcccgcctaccaacaacaaacgtgcttttttcctctttgaaacctgcagttctgtgtgtctgtttatcaggggtgtacaagaaaaagaaaggaaaatagattggggagggaggcctagaaataatgtaaaatcagccttggaaatggggagaaaatgtcgggttattcgagatatgtcgtcggaaactccaaattagcaaatatgtatgaaaataggaaccatctatgaagctggaagagaggataaaaaacagaggtgccaagttagaccccaaactttcccccctaaaacctgagtcgcccaggctgaaatccagggtttcaacaccaaagggaaagcaggaaaatggctcaaaagagaaagggatgtgtgtagatgtgggaatgaccgtgatgtttggaagtcactgcgagcagccggtttctatagctggaaagagggagggaggtggagaggactgcggagaagctccctgttcgacatcccagtccccgggccacctcccaaaaaagggcaggctgggctgcagactcggagtgtgagtgcacagcctttgcccgccgggcagcggggctgagcggagggagggtcgcctgggaacactagttctgtgctcgtccaggcagcggctgagagcagaggagtgggggcatcaaggaaagccgcggctgccttactggcctcgagttccgcgagcggggctgggcaccaagcctgaggctggggggacaggggcgcacgactgcactcccggtccggggcagtgcaggtattcggggaagaggaatcgcctctccagaaccgactgctgttccttccaccacccgtaacctctctgcccctcacttcctgtttcctctgctctgggtacccccagcccctctggccccaaattcctcccccatgctcagttctctgtctcactggcagaggagccggccgtgtttccccctaaagcccgcttggccctcccagttccgcagctgcgcggcccgcccgccgatcccatggctcccttctccacccttgggatttctcgtttgttcgcctcctctccggtaccctcaatcccgtagatgcaggtgggcatcctccagccccagcaagtactgcggaccagttgggctggctggcccctttcctgcagaagcagacaacacccacttctaccctcgtaggagcccctttctacactcacttccctggaacccgtgatcctgactcccctcctcccggaccccaagcatccaggacgtgtacggtataaggggaagttgtagtgggaggcaggtgggcgttgttcctggagtttcagggtagagaagcaggtggggaggagttgggtgagatacagaggtggaagccaaaagtctggagttaacctgacttctcttctggctccaggggctgccgggatcgtctgtcctcaccctccttgtcctccccagccctaaccacccggcagcctcttctctgtctctgctgcccgtcctgccttcactctgaaacagcctgccccctcccgggtccccagtcctcacctttgccccacacgcccccctctctatttatcacatttcctttcgtgtccccctaaccccatcgcttggtgcgagtgctctcttgccctcctctccccatgactgaacctcacagacatggctgtttatttaggtgacaccatgtgggagacacagaggaacccatttccatcctggctccactggggcatttcctttccaagtccttcagtccctcccaaccaagcctatgttactgggtcaggcaaggtgagagatataaagtatgcaaaagaaaacgttactattttgttgaggaacaagatacatgtggaatagttgacaatgcagaggaacagggtagaggaaggagggttgatacagtattagagtcagacaaacgtgggttcaaatcggctctgccacttacaaactgagccaccttgcacaaggcactgggtcttccctctgtttcttcacctgcaaaatgggggagagtaacaggttgccctgagaattgagagataatacaagtaaagttacacgcctaacagatcagtggctctcccagtgtggatcccagactagcagcatcagcatcgcctgggaacttgttagaaatgcaaattcttgggccccaccccagatctgctgtttaagaaactggagatggggccagcaattgcattttcccaagcccccaagtgcttctgatgttcacacaaggctgaggacactgaagaagatgccccacaaaatgttacggccttgccttatactataaagaatggcaaagggcccgtgtaggggtgctctgtgactcccaagcaggaggatcactgcaggccagtagggaggtgaggagcggcctcacagaggaggtgggactgggctggggaaggaaacagagaagcctttctgcagtgggtgagggagatggggggaagctccctctcccttaccctacctaccacccagcacgattttacctctcaggcttctcagtctccaaagcagagcagaccatgtatctgaacgcggaagctgagctctggagcccagagcctcagggccctgagggaaggttcccccaggagacccctgcccaggcaaggcctaactctgagggccctgtccttgcctggcagccctcaacaccctgggaagctgctcacaggaggctgtgctctgggcttctccaccttcacagtccacctcagcgaggagggaggtgccgctgaaaccgccaaccacttcttcagttgggtgtggggcttagcctctcctctcccacctctgtctcctctgcttcctcctcccccatgctgctctcacctctctcccctctccctgcaggctgggagcaaagggagaggaggaggagaagagaggacagacccagccctctacctactatggcactcctttacctgccagctgtcacaaccaacccttccccaactcccctacccgggacccccatctccacccacaaatccactcaaatttcctgcctggaatgtggagtctcttcccactgctctcacctctctcagcacagcctgggcaaggggcccttctcctccccctaatataggaagtacttcagccaaggggcccacctgaccctgtgcgaacactttcacacaggtgataggccctactcctgcagaaagtgtggccacagctcttgccacagctcacacctggcccagcactgcggcacacacctgcctgaacccaatcactgccaccagtgtggcaagggcctctccccaaggctccagcccgttgcagcctgccactctacacacaggcaagcagccttacgtctgtgccacctaagccttcttgtggtagatgagggtgctggcccccactccaacctgcaacaccagcagcagaaccatacctgggggcgtccccatcacagtgaccagtgaggcaagggctatggacattgctcagggctggtgcagcaccagcaagtctgcagaagcaaaggctgcaggcatggtttctgatacagccccaggctggtgcagcatcaccagggccacatcagggacaggctctactgcttgcctctgtggctgtggtttcacttggaacacccacctgccatgacaccaggcctcatatgtggagaggaatgagatgaacacagtggggaggcagggaatcagagcccctgtggctgcatcaccgcccccaatctgcagcgctctatgagggtggcagggcagcctcagagacagacttcctccacctgtgggaggcataacagagcagagatccacccactcccagccagggtgaccttcagagcaaccataaggggtagctcgagtgtctcgcctgaacccactcaaagctggaatggccaggtccacttcactctagaccaaagtgccaagtcctaagggagctcccaagccaggaacttttctctggagaagaatccatacttctcagggtcttaaaaaattttgttttttatataaataagaggtcctggggcacttttccatctcctgtcctccatcggagaaatttcactaggctgtctcagacgtgctgttgtcgtggatggattagactccttgggactttcttgaagggtcattttaaagtgatagcttaggctgggcatgatggctcatggctgtaattccaacactgtgggaagccaaggtaggtggattacttgaggccaggagttcaagaccagcctgaccaaacctggcaaaaccctggctatacaaaaaacacaaaaattagcaaggcgtggtggcccatgcctgtaatcccagctactcaggaggttaaggcatgagaatcacttgaacctgggaggcggagtttgcagtggccgagatcacgccactgcactccagcctgggcgacagagtgaacctctatctcaaaacagaacaaacaaagaaaaaaatgcccttaagagttcttttataaaaataaaaacagaaaaaaaatagataacttaatttccagagatctccaggacaaccccctaccatcaaatcctagtcccccaactaatcccacccaacccccagaggctactgggttcttcctgcctcaggtgttcacactacacccggcgcccctatttgatgagccatcttcctgtgcctactccttgcttcaccaggtcctgttcttacgagtttactgttactcttcatgttatagggtaagtgagaccttattcttgtattaacttgccccagagtatactctttggaactcggcaatatttctccctatgatgtaccaaggaggttgattactgacacatgctagaagaaattaaatacgcttagtggtcaaaggattacttgagagactgctaatcatttccaccctttcgggaaatgtgtattgagtctaccatgtgtcaggagttgttctgggacctgggtatcatagtcatgtggcatagcccctgccttcgaaggatttgatgtaggggcggtttagaatgagcatctcaatattgaatccagcacctagtcctatccattttatctgctctaatatatctcaagtctgtccactcgttttcatccctccacatccctgggctagccaccatgtggaccatgtggccttctctgagtcattgcagtagctgaagaggctgggaatggccttctctacagtatgacacacacctaagagggatcctttaaaaatgcaaatctgattgtttcagtcagcctccttaaacctattcagtggttttccattgatcttaggttaaagacccaagtccttaacctgacctctaaggccctgcaaggggtggcccctcctctccagcctcatctcccaccacaccccctcactcgtgtgctccagttgctgtccaccttgtgcttcctcctgcacagagtctccagggaggctggaccctctgtggaacggctccttcctctgttcctctcctcttagctcctcttcattcttcaggcctcaccttctcaatagcctcagggaagccttcctgaccttcttttcagggtcaaattctcctgttatgagcgctcacactaaggtgtacctttcctcagaggcacttggccctgttggagttctacatttgttgatgattatgtacagactgatgtctgtctgccccattgaatgtaagctccctgagggcagggactatgactgcagatgctcactcttgccactccctggacctaacactggatactttataaatagtggttgaatagatgcattcatggcaggatctgggcaggaggctagatatttcaggatttcagaggtgatgaattaaggccatgattctccctcctgtagctgcagcccaagaatcccatgtgctattacctaacactgttacttcctccttaattcctggcatcattcaggtccacagccctgccttcatcccaggcttcctccatcttgcctgtgagaccctctccctctttaactttttagttcccctttctggttttgcctcattgacttcagaagccagcatggaataatgtcgcaagacccaggatccagaactggaggccaggtgcagtggctcactgctaaaatcccagaattttgggaggccaaggcaagaggattgcttgagctcagaagttcaagaccagcctgggcaacatagtgagacttcgtctctacaaaatattttttcaacttttattttaagttccggagtacaagtgcaggatgtgcaggtttgttacataggtgaacatgtgctatgatggtttgctgcacctgtcaacccatcacctaggtattaaacccggtatccattagctattcttcctgatgctctccctcctgccacttccccttctgacagacttcagtgggttattgttccccccacccacatgtgtccaggtgttttcatcgttcagctcccacttataagtgagaacatgtggtgtttggttttctgttcctgtgttagtttgctgaagatagtggcttccagttccatccacatccctgtaaaggacatgatctcattcccttttatggctgcatagtattccatggtgtacgcatactacattttcttttttcttttttttaaggtggtgtcttgctctgtcacccaggctggagagcagtggcacaatctcggctcactgcaacctctgcctcctgggttcaagcgattcttctgcctcagcctcccaagtagctgggactataggcgagtgccaccacaccctgttaatttttgtatttttagtagagacaggatttcaccatgttggccaggctggtcgtgaacttctgaccttgtgatctgcccacctcggcctcccaaagttctgggattacaggtatgagccatcgtgcccggcatttttttttttttttttttttttttgagatagagtctcactctgtcacccaggctggagcgcattggcacaatctcagctcactgcaacctctgcctcccgggttcaagaaattctcctgcctcagcctcctgagtagctaggattacaggcatttgccaccacacctggctaatttttttgtatttttagtagagacagggtttcactatgtcggtcaggctggtctcgaactcctgatccacctgcctcaggcttcctaagtgctgggattacaagtgtgagccaccacgcctggctgcatactacattttctttatctagtctttcattgataggcatttgggttgacgccatgtctttgctattgtgaatagtgctgtagtgaactacaaaatatttaaaaattagccaggtgtggtggcttgtgcctgtagtcccagctacttgggaggctaaggtggtaaggttcgttgaacctgggagtttgaggctgtagtgctctatgattgaggctgtgaataaccactgtatagtgagaacctgtctatttcttttttaatctttttaatctagctaactaggaatagaaagtaacttccaaagtcaagacaaggataccagtttttactgtttctattcacctttctgccaagaagtctgaagtgacacaagaagaaaaagaagaaataaagccatcactatacatagacaattactatacatagattgcttactatacaaagaaaattcacaagaacctaccaactattagaaataacaatttccttgccgggggcaaggagaatacacaaacatcaatatccttacaccacagcaataaacagataaaagatttcattttaggccaggcatcgtggctcacgcctgtaatcccagctcttccggaggccaaggcaggcggatcatgaggtcagcagatcgagaccgtcctggctaatacagtgaaaccccgtctctactaaaaatacaaaaaattagctgggcgagttggcaggcacctgtagtcccagcaactggggaggttgaggaaggagaatggcgtgaactcagtaggcggagcttgcagtgagccgagattgcgccactgcactccagcctgggcgacagagcgagactccgtctcaaaaaaaaaaaaaaagaaaagaaaataccatttgtcataacaaaaatcataagatacttaggaataaatataacaaagtctgtgtatgatatttatggagaaaattataaagttttattagagaacataaagaagatataaaagaataggaagagatcccctactcacaaagacggaagtttgatataaagctgataatttttctcaaatctaaaaattcagtacaattctaagcaaaactccaatcagatattttatggaacttgacagactgttcttaaaattctttttttttttgagacggagtctcactctgttaccgaggctggaatgcaatggcgcgatctcggctcactgcaagctccacctcccaggttcaagtgattctcctggctcagcctcctgagtagctgggactacaggtgcgcaccaccacgcccggctaatttttttgtatttttagtacagacggggtttcaccatgttggtcaggctggtcttgaattcctgacctcgtgatctgcccgcctcggcctcctcaagtgctgggattataggcatgagccaccacacccggccttaaaattcttatggaagagtaaatggccaagaaaaaacaaaacttgaagcagaagaatatgagatcccttgcctaaccatatgtcacaagtttactggttgaaacttagagtgattaaaacagtctagtcctggtatatgcacacataaatagaccacagtacagaacaaaacttttttgaatcagatcctaatagggtttggatctgtgtccctccctctccaaatctcatgtcgaattgtaatcccctttgttggagatggggtctggtgggaggtgattggatcatggaaatggatttcccactgggtgcagttctcatgatagtaagttatcatgagacccggttgtttaaaagtgtgtggaggccaggtgcagtggctcttgcctataatcccagcactttgggaggctgaggcaggaggatcacttgagctcaggaggtcaagaccagcctggacaacatgctgagacatcatctctacaaaaatacaaaaatagtagccgagcatggtgatgcatgcctgtggtcccagctactcaggaggctgaggtgggaggatcgcttgagcccagagggtggaggttacagtgaactgagattgtgccactgcattccagcctgggtaacagagcaagactctgtctcaaaaaaaaaaaaaaaaagcgtgtggcacctcttccctctcttcctcctgctccagccacgtaagacatgcctgcttccctttcaccttccaccatgattgtaagtttcctgaggcctccccagccatgcttcctatacagcctgtggaactatgagccaattaaactttataaattacctgatttcaggtatttatctatagcagtgcaagaatggactaatacagaccctcaaagatatgagacttggctataatggaagtgacataaatcagtgggaaagttcaatggttttgagttaactggctatccaaacaaacacacaaaaaataaattctacattacatcctacccagaagtaaatttcaggtagctagagtaaaaagcaaaactgaaaactattcaaagaaaatataagatcacatattgatgatatcagaatagagaaggatttcttatacaaaattttaaaagtacaaaagtacaagcagttaacaaaatgaagaacactatatgattatatcaatagatgggggaaaggcgtttgacaaaatttaacatcctttcatgatacaaattcttagcaaattaggtatagaaaaagtgtatctcaacacaataaagcccatatatgacaaacccacagctaacatcatacataatcatgaaaagttaaaagattttcctctaagatcaggaacaagacaaggataaccattctcaccatttctattcaatatagtactagaagttctagtcagaacagataggcaagagaaagaaatacaagacatccaaattggtcaatgttgaccaggttggcctcgaactcatagcctcgcctccctgtgcaccaggacagctggcttgagccactgatgctccctaggcatccaaattggaaagaaagaagttaaattgtcactttgtagatgacatgatcttatatagagaaatccctaaagataccaccaaaaaaactattagaactaataaattcagtaaagttgcaggatacaaaatcaatattcaaaagtcagtagcattactgtatactaataatgcaccaaccaaaaaagaaatcaagaaagcaatcacatttataatagcatcaaaaatatatacttaggaataaatttaatcaaagaggtgagaaatctgtacactgaaaaccataaagcattgaagaaagaaattaaagacacaaataaatggaaagatattccatgttaatggattggaaagattaatattgttaaaatgtccacactaccccaaactgtagattccatccaacctctatcaaaattccaatgacattttcacagaaatagaaaaaaaatcctaagattcatatggaaccacaaaagacaaggaccaaaatggccaaagcaatcttgaacaaaaggaacaaagctagagccatcacactacctaatttcagaagctgccacaaagctatagtaataaaaacagcatggttctggaacaaaaacagacatataagaccagaatagaggccaaaaataaatccacacattttatggccaactgatcctttacaaatatgccaagaacatacaatggggaaaggacagtctcctcaataaacagtcctggggaaactggatatccacatgtagaagaataaaatttgaccatatctcacctcatatacaaaaatcaactcaggccaggcatagtggctcacatctgtaatcccagcactttgggaggctaaggccaatgggttacttgaggccaggagttcgaaaccagcctggccaacatggtgaaacctaccaaaaacacaaaaattagccaggggtggtggcacacacctatagtcccagctactcaggaggctaaggcacaagaattacttgaatctgggaggcagaggttgccaagaccacaccactgcactccagcctgaagaacagagagagactgcctccaaaaaaaaaaaaaaaaaaaaaaactactcaaaatgaattaaagacttaaacataagatctgaaatggcggggtgcggtggcttacacctataatcccagcactttgggaggccaaggcaggtggatcataagatcaagagattgagaccatcctggccaacatggtgaagccccatctctactaaaaatacaaaaatcagctgggtgtggtggtgcacacctgtagtcccagccactcaggaggctgaggcaggagaattgcttttctcctatattttcttctagtatttttacaatttcagatcttttttttgagatggagtctcgctctgttgctgggctggagtgcagtggcatgatcttggcttcttgacattggtctgggcaataatttttttggacaaatgagattgcatcaaatgaaagcttctgaacagcaaaggaaacaatcaacagacaacctacggaaagggacaaaatatttgtaaactatacatctgataaggggtgaatatttttataagaaacttaatagcaagagttgttgaaaaccaaaaatctgattttttttctttaagttggggtctcaccctgttgctcaggctggaatacagtgccgcaataataactcactgcagccttcaactcccaggctcaagcaatcctcccacctcagcttcccaagtagctgggaccacaggcacaccccaccgtgccctgctaatttttaaaatttttttgtagagacagggtttccctatgttgcccagatttatcttgaactcctaggctcaagtgatcctcctgccttggcctcccaaagtgctggaattacaaacataagccactgcatccagccaaaaatctgattttacaatgggcaaatgatctgaaaaaacatttctcaaaagaagacacataaatggccaacaggtatatgaaaaacaaatgctcaatattgctaattatcaaggaaatgaacatttaaaccacagtgagatatcacctcatacctgctaagatggctctgataaaaaaaataaaaataaaccaagagattacaagtggtggcaaggatgtggagaaaaaggaaccctcacaaactgttggtaggaatgtaaatttgtacacctattttggaaaacagaatggagcttcctcaaaaaattaaaactaccatgtgatccagtagttccattatcaggtatatttcgaaagaaatgaactcagtatgttgaagagatatctgtattcccaagttcactgcaccattattcacaatagccaagacatggaaacaacctaagtgtccatcaatgaataaatagagagattatggaacatatacacaatggaatactattcagtctttaaaaagaaggaaattctgtcatctgtgacaacatggataaaactagaggatattatgctaaatgaaataaaccaggcacagaaagacaaataccatgatttcatttacatgtggaacctaaagagtcaaactcagccaggcatggtggcacgtgcctgtagtcccaactactcgggaggctgaggcaggaggatctcttgaatccaagagtttgaggctgcagtgagctgtgatcagacctctggactccaacccagacaacagagtgagaccctgtctcaaaataaatttaaaaaaataaataaataaaataaaattgcagaagcagagaatagaatggtggctgcacaggggctagggggcggggggcgggtgtgggcagggattggagagctttagtcaaaggatacaaaatttcagttaggtagaataaattcaggagatctattgtataacatgatgactagagttaataacaatgtattgtatacttgaaaattgctggccagctgcagtggcttatgtctgtaaacccagcactttgggaggctgaggtgggtggatcgcttgagaccagttcgacaccagcttgggcaacatggtgagaccccatctctaaaaaaaatagaaaaattagctgggcgcagtggctcatgcctgtaatcctagcatttcgggatgccgattgcttgattgcttgaccccaagaattcaagactagcctaggtaacatagtgagaccctgtctctacaaaaaattgaaaaaattagcaggatgtggtggcacgtgccagtagtcccagctacttgggaggctgagaagagaaaatcacttgagcctgggaggtccaggctgcagtgagctataatcttgccactgcactctagcctgggcgacagagcaagatcctgtctcaaaaaaaaaataaaaataaaaataattgctaggagagtacatttcaaatatcacgtttaaaatgatagtatgtgagataacagatacagtaattactctagccattacacacacacacacacacatatatatacacacatcatgttgttacaccatagatacaatttttatttgtcgactataaataaatgcacaagcaataaaggaaaatattgatacatatgaccacgttaaaacatttttaagcttttataagaaatcacataggccgggcgcgatggctcaagcctgtaatcccagcactttgggaggccaaggcgggtggatcacaaggtcaggagattgagaccatcctggccaacatggtgaaaccccgtctctaccaaaaatacaaaaaaattagctggacgtggtagtgggtgcctgtagtcccagctactcgggaggcttaggtaggagaatggcgtgaacccatgaggcggagcttgcagcgagccgagattgtgccactgcactccagcctgggcgacagagcaggattccgtctcaaaaaaaaaaaaaaaagaaatcacgtaaagtaaaagacaagccacagacttagagaatattcacaatctacataaacaacaaaggattatatccaggattcataaagaagttgcagatccatatgaaaaggacaacgcaagagaatatgagcaaaagctgtgaataggtgagtcacaaaagagaaacctaatggtcaataaacataagaaaagatgctcaatttaaccagtaatgtagaaatgcaaatcacagcgcgagttaccattttacacccacaaaatcaccaaaattaaaattattctaacactgttgacaaaaatgtgggacaataggaatgcatatattttgtgttgaagtgtaaacagatacaacaaatttgaagagaattttggcaccagttaatgctgaaaatgaatattccctatgacccagcaatcttgcttctagatctattccttagaaaaacatttctacacatgcacaaaaaggcgaggataaaaatggtcattgcagtatcagttaattgtcaagaagaagtggaaataagctaactgttgttaagtaaaatggataaataaagtatggtttgttcttataatgggatactatacagcagttaaatgaattatagacatatttagcaatgtaatgagtaagaaacttgcaaaaatggatgttgtatgatattatttgtgtgagttttaaaatacacaaaacagtggtatatgtttaggaaagcaaacattttttaaaagtgcaaagtacgcatgggaataattcccaacaactttagaatgataattactacaaggaaggagagaaatgggatgggcgttaaccgaatttgtaatccattttttttatttttaattttaaagaaaagtgatacaaagcaggcgatgcaaaggtgaggatttgcttaactgggttgctgtgatcatgaaatgagccaatcaatgggacagtgctgaatgaaagttgttgccagtctctttagaagggtacaatgatggtggctgtgcaggtggagagatgtgatttcctgacctattctctcctccaccctgtgttgagtctcacgcctcctattggacggtataaattggtataaatcttttttttttttttttttttgagacagagtctcactgtcactcaggctggagcgcagtggcatgatctcagctcactgcaacctccgcctcccagattaaagcgattctcctgcctcagcctcctgaatagctgggatcacaggcagccgccaccatgtccagctaatttttgtatttttagtagagacggggtttcaccatgttggtcaggctggtctcaaactcctgacctcgtgatccgcccgctttggcctcccaaagtgctgggaacaggcatgagtgaccacgcccggctgatataaatcttaacagctacatgccccaatttcctcacctacaaaatgtgtgtattcaaagtgctacctaatagcattgtcgtgagagtaaataagttgtgtgaagtgctttagaacacttacctggcttagagtaactgctctaggctactgtttttgttgttgatgctgttattatggttgttgttaggtatcacctccagctgcatataaactcttttttaatctcaacttctaaaaatctcataagaaccttacttggcaacgaaagtgccccaaaactgagaagacccagactcttccttcaatgatctagatcaatttgcacctcaaattcctgtaagggccaggcaagtaatgtgccaagtgccaagggaaggctataacaggctggagggcaccctcccctcctagaggggcagcagctcctggtccagcgttgccgcataggaattcagagctggcactgccgtgataaattgaaaatctcaatttttctgtaaaatcactctttttatttttcctttttttttttggcaggatctcacgttgtcacccaggctggagtacagtgccatgatcccagttcactgcagctttgacctcccaggtccaagtgatcctcccatctcagcctcccaaatagctgggactacaggtgtgtgctgccacacctggctaattttgtatcatatacatatatatataaacatacacatacacatatgtatatatacatgtatacatatgggttcaagcattcttctgctaattttttgtatttttagtagacgtggggtttaaccatgttggccaggctggtctcgaactcctgacctcaagtgatccacccgccttggcctcccaaagtgctgggattacaggcatgagccatcgcacccagctaatttttttagtttttgtagagagatggtctcactatgttgtccaggctggtctcaaatttctgagctcgagtgatcctcccacctcagcctcccaaagtgctggaatctcagccatgagacacggcatctggacaaaatataaatgataatgaatacacatcaatattttaaatcaaacacatttagataaagctgactttttgcctgcttttttttgaaattttgggctgggcccagtagctcacacctgaaatcccagtgttttgggaggtcaaggtgggcagactgcttgagcccagtgttttgagacccccctgggcaacatggtgaaatgccatctctacaaaaaatagaaaacttagccgggcatggtggcacacatatgtggcctcagctactctggaggctgaggtagaaggattgcctgagcctgggaggttgaggctgtagtgagccatgattgtgccactgcactccagcctggtgacagagtgagaccctgtctcaaaaaaatatatacatatttattaatttttattatgtattgctatggcataaatgtttgtgcccccctaaaattcataaattgaaacctaatccccaatgtggtgatattaagagatggggcctttagaaggtgattaggtcatgaggggcctgtcctcatgaatgggattaatgccgttataaaagaagcccaggctgggtgcggtggctcatgcctgtaatcctagcactttgggaggctcaggcgggctaatcatttgaggtcggtagttcaagacaagcctggtcaacatggagaaaccccatctctactaaaaacacaaaaattagccagtcatggtggcaggcatttgtaatcccagctattcaggaggctgaggcaagagaatcacttgaaccctggaggcagagcttgcagtaaaccgagatcacgccactgcactctagcctaggtgacacagcgagaccctgtcttaaaaaaaagaggcccaaaggagcttgtttgccccttccacccgtgaagatgcagcaagaaggcgccatctatgaagcaaagtgtgccctcactggctaccaaatctgctggcaccacctgcttggacattctagcctccagaactgtaagcagtgtttattatttataaattgctcagtgtaaggtattttgttatagcagtctgaatggactaagacagatagttttataaaaattaaactacagttggcattttgtatctgtaggtccacacctatggattcaaccaactgaagaataaaaatatttttaaaatatatatggccagtccgggcgcggtggctcacgcctgtaatcccagcactttgggaggtcaaggcgggtggatcacaaagtcaggagatcaagaccatcctggctaacgcggtgaaaccccatctctactaaaaatgcaaaaaaattagccgggcatggtggcgggcacctgtaatcccagctacttggaaggctgaggtaggagaatggcgtgaacctgggaggcagagtttgcagtgagctgatatcctgccatagcactccagcctgggtgacacagcaagactgtcagaaagaaagaaaggaaggaaggaaggaaggaaggaaggaaggaagggaagggaaggaaggaaggaaagaaagaaaaaataatacaaataaaaaatacagtataacatatatttatacagcatttacattgcgataggcaccatagataacctagggatgatttaaagtatgtggaagaatgtgcataggttatatgcaaatactatgccatgttatacaaggggtttgaacatcagtgggggttttggaatcaatccctggtgaatactgaggatgattgtattcataatctcgtattcaatgtccatctattacaacataaagaatcaatatcatacttcacaagagttatatctagacctacatgtattcaatttttttttcaataggcttttggggaacaggtggtgttcagttacatgaataagttatttagtggtgatttctgagattttggtgcccccatcacaggaggagtgtacactgtaaatgtgtagttttttatccctcaccacccctcccaccacatgcatataaatttaacagtaataaggattgtttaatacagcaacatgttcctcagctatcctttgcaactgttgtaaatgcagcacaacatacatccatacctctaaaacaaagagaaacaagaaaaaccacactcaacactattgggaaatgatactttgtcatgctatttgagaggtaatatttaacaagctggttaaagtgatttcacttacatgtttccactgcttaaatcctccctacactccaaagcagtacatgcttcagaatccaggcagaggcacaacctcagattttcacagaattggctatagtcatcttttgtttccaggatacagggcaagagattacagaagtcaccattccccagggcttgaacggcgttgattacaagagcagatgtgtaagatttcaggttgtgctgttccagcactgacagcagatcagtgacagaggtgcccaggtgtcatgtaataaatgtgtgtgataagttgtttgtgataggtgaatccccctaaagtatgtgggccagggcagggcccctgtggttcagatctgaggatgatactgcttctgtgggaagatcatgacttctgtttcaaatatgctaagttaagctgggcaccgtggctcatgcctgtaatcccagcactttgggaagctgaggcaggtggatcacctgaggtcaggagtttgagaccagcctggccaacatggtgaaaccccatctctactgaaaatacaaaaagtttgccgggtgtcgtggcggatgcctgtaatcccagctactccggaggctgaggtaggagaatcacttgaacccaggaggcggaggttgcagtgagccaaggtcttgccactgcaccccagcctggccaacaagagcgaaactctgtctcccaaaaaaaaaaaaaaaaaagctaagttagtaatacctttgggacatccaagtagggatgccaggcaggaaggtggtcaaatctggagatttgaggcaagagataaatttgagagtaaccagctgatgggaactgaagccacaggacaggtgtgatcccctagaaggaaagggtagcataagaagaggagggtccaggaccgacctctcttgatgaactccaatatgaccaggtgatttcagtcaaaggcggagtgagccggctgaggggtggaagagcagccgatggagggatgggaggaagccagaagaggccaaatcctggaggccaaaaaacgacagtgtttcaagaaagaactggccagcaacgtcagctactagtggcagttcaagtaagaagaaaacgaaacaatggacttaatgacataaagttcattgcaaaaaaacatttgagtagcagcaaggtagagataaacaccagcctgaaagggtcgagcagtgagtggaagtgagagaattttgcccagtttttttattatgaaaaatttcaaacatacagaaaacttgaaaatataatacaatattgtttgtatgtcgatcattttacttagatttaacaattgttatttatacatatatacaaatatttatatattatatatatacaaacatatatatatacacacacatatatatatggttctttttttttttttccaagacagggtctcacttcatcgcacagggtggagtgcagtgacctgatcatagctcatctcagcttcaaacttttgggctcaagcgatcctcccacctcagcctctcaagtaactggggccacaggtgcatggcaccatgcccggctaatttttaaattttttgtagagacaaggtatcgccttgttgcccagctggtctcaaactggactcaggtgatcctcttgctttggcctcccaaagttctgggattacagacatgagccacagtgccaaggcctatatacgtctttgtgggcttgtttttagttttttgttttgagatggaatttcgctcttgttgcccaagctggagtgcaatggcgcgatctcggctgtacgcaacctccgcctactgggttcaagcaattctcctgcctcagactcccgagtagctgtgattacaggcatgcgccaccacgccaagctaattttgtatttttactatagatggggtttctccatgttggtcaggctggtcttgaacttccgacctcaggtgatccgcctgcctcagcctcccaaagtgctcggattgattacgggcatgagccactgtgcccagcccttttttttttttttaaacatagaaattgttgagtgactactaaaacattcttggaccatatgaaaatataggaaagcatgtgcttcacacctaagtacctcagcatgcatctcccaaaaataaggagattccataaccacaatacgtaatcacagctaagaaaataatgatcatggccaggcacggtggctcacacctgtaatcccagcattttgggaggctgaggcaggaggatcacaaggtcaacagattgagaccatcctggccaatatggtgaaaccccgtctctactaaaaatacaaaaattagccgggcgtggtggtgcatacctataatcccagctacttgggaggctgaggcaggagaattgcttgaacccagtagggacaggttgcagtgagctgagattgcgccactgacctccagcctggtgacagagcaagactcagtctcaaaaaaaaaaacaaaattagaaaataacgatcatttcttcacttcatctgatagcagaatatactcaaatattccccagttagcctcaaaatgtcttttatatatatatttatatatatatatatctttctttttaatttctttccttcctttcttctgtttttccttccttccttccttcctttctctctctcctccctttccttccttcctttccttctttcttttttgactgggtctcactgtcacccaggctagagtgcagcagtgcaatcacagctcactacaacctccacctcccaggctcaagtgatcctcccacctcagcctcctaagtagctggaactactatttaggtgtgacccaccacacctgactaatttttgtatttttttttttttgtagagacagggtttttctctgttgcccaggtgggtcttgaactcctgagcttaagtaatccacctgccttgaactcctgagctcaagcaaagtgctggaattacaggcgtgagccactgcatccagcctatgcatatatttcaaatcaggatcaaatcaaggtacatgcgctgcatgcattgtgttcctcttggaggggtgtggatctggtgacagatggttgagggagctcacctctgatgactttcattttctctgtgacataagagggaggtcatcaagtgagcatgaggtgagagacagaagagcctcagaggttcaaggatcagggaggtttaacgtagccattgaccagagtgatgtggttgggccactaaacaattctgggagcctccttagagttcatgatcatgagtgaggagtgggaaccatttcctgattgtgtgatttcccccaccaccaccaacagttcttggctatcagagtaaaatcctgaagaaaacagatcactgggctcatccagggttggggttttgccacttgggtacaaaggatgaaaatacagaggggaaggggagttggcgacattgtccagagaggtgttgaaatgaagggttgtggagttgagctgaatagggaggggctcataagctggaagacggaaggcatcattgatccaaaggtcctaggagactgaaaattggttgcgaggagggcagacagactgatggacagacggttaggaggtgggggccaagagcaggctgcttgactgattctcaaggaggggctctttcaggtgataaggtccagggtatgacaatgagaatgtgtggccgagttggagaggagaagattcttggggattaagtggccaggttattgagaggtcaagtagggaatggatcctccaggtggacaatgaagtctcccagagggaggactcaatgcaaagacagacggtcagctgggccagcgttcccctgagtgaggtggaggggtctggcagacagtagcagtgagaaaggaagaggaaagtttagcctaattgcagtgcctggaaggccgcgggttattttaaactagagttgggggctgggggaggagtagtccggaggcagcaatctgaagccaggagagcaccctcagctgtaagaaaatcaacagctctcatttcagaagcctgcaaaggaggtagtgccctcaagggagagttaaatttcacttaacgccaggaagtggagggaatgctccaaggagaagctaagggtatgaggggggctacagtttattagagggcacaggcaggttagggagggggaaagtggagggctgagtcagagccagaaggtacagagtgtcatggagacacagtgcaatagagtaggtgggcttgggagtttatgttttcactatgaaatgataaaaacaaggacaggaggcaggctggatttcacccagttagtttcttggaagctgtaaaaagtggcgtttaagaatgtagccttggccaggcacgatggcttatgcctgtatcccagcactttggaaggccaaggcaggcggatcgcttgaggtcaggagtttgagaccagcatggccaatatggtgaagccccgtctctattaaaaatggaaaaaacagccaggagtggtggcaggtgcctgtaatcccagctactcgagaggctgaggcaggagaattgcttgaacccgggaggcggaggttccagtgagccaagatcacgccactgcaccactccagcctgggggacagagcaagactcgtctcattaaaaaaaaaaaaaaaaaaagaatgtagcttcaggcggggtgcaatagctcacgcctctaatcccagcactttgggaggccaggagtacaagaccagcctagcaaacatggtgaaaccccatctctactaaaaaaaatacaaacattagccaggtgtggtggtatgcacctgtaatcccagctacttgggaagcttaggtaggaggatgacttgagcccagaaggtggaggttgcagtgagccaagatggtgccaccacactccagcctgagcaacaaagccagaccctgtctcaaaaaaaaaaaaaaaaaagaaaagaaaagaaagaaaaggaaggaaggaaggaaggagagagagagaaagaaagaaaagataaagaaataaagaaagaaaggcaggcaagaaagtggcttctaaagcagaactggctgcattccaattccagctttgtcatgcactaactgtcctgtctataaccttggcaaggtctctgggcatcaatttcctctctgtaaaatggggataacactagtacccacctcacagggttgctgtgacaattcaaagatgcaatgtgttaaatgttgatatggtttggatctgtgtccccaccaaatctcatgtagtcccagtgttggaggtggagcctggtgagaggtggttggattatgggagtggattctcacgaatggtttagcaccatcctcctggtgctgttctcatgatagagagttctggcaagctctggttgtttaaaagtgtgccgcacctcctccctctctctcggctcctgccatgtgagaaggctcgctcctcctttgccttctgccataattgtaagtttctggagacctccccagaaggcaagcagatgccagcatcatgcttcctgtagagcccacagaaccatgagccaattaaacctctttttttttttgagatagggtcttgctctgtcgcccaggcagtggcgcaatcacagctcactgtagcctctaccttctggtctgaagcaattctcccacctcagctccccaagtagctagaaccacaagcacatgccaccatacccagctaagttttgaattttttatagagacgggtttttgccatgttgcccaggctggtctcaaactcttgagctcaagtgattaaccctccggcctcagcctcccaaagtgctgctaggattacaagcatgagccactgtgcccagcaaacatcttttcttttctttttttccgagacggagtcttgctctgtcacccaggctggagtgcagtggcatgatcttggctcactgcaacctctgcctccccggatcaagtgattctcctgcttcagcctcccaagtagctgggattacaggtgctggccaccatgcccggctaatttttgtattcttagtagaaacggggtttcaccatattggccaggctggtctcaaactcctgacctcaagtgatccacctgcctcagccacccaaagtgctgggactacaggcatgagccaccgcgcccggcaacctcttttctttataagttacccagtttcaggtatttctttatagcagtgcgagaagggactaatgcaaatgtttacaacagtgcgcaaatatttataacagtgcttgggctgtcacctcagacacacttggtggagccttgcaggcccagcagagcagcctctttgattacctgaaccctgcccctggctaggtaggaaacatgaagtggatgataatgatgacttgatgagcagttgtgaatgcataaattatatggagacactaaggactgcaacagacaagaagatctcagtgacaaacgggttatttagggcagcagccaactgactcccacaatgagtgggatctggacaagaaggcgtggtttcccaaggccactgaaggtttcattgctacatacccagccaagtgtggcttttctaatggtggggcatctagctctcctgcaaatgtacaaaatgtcaatgctaggaatgcagaatttctgcaaagaaaaccccccaaacccactgatcctaaaaacaggggagataaaagaaaaatggaatgaggataatttcatgttgaagaagacagaaatacaaatgtctatatatctggtttgcctccaggagaaatcctcagaagacttcaaagtcaagctttatgaagatgatcaaagaaatcttaaaggagatgcgctttgctgttacttgaagagggaatctgtgggccttccattaaagcttttggatgaaaatgaaattagaggctgtaggccaggtgcagtggctcacgcctgtaatccaagcactttgggaagctgaggcaggtggatcacctgaggccaggagttcgagaccagcctggccaacatggcaaaacaccgtccctattaaaaatacaaacattagccgggcatggtggtgcatacctgtagttccagctactcaggaggctgaggcagcagaatcgcttgaaccctggaggcagaggctgcagtgagccgagatcatgtcattgcactccagcctgggcaacaagagtgaaattccatctcaaaaaaaaaaaaaaagaggttacaagaagaagctgtcactacaacaaaagctgttggtctggggatctgcaagggagctgggccatccagaaggtaccataagcaagttgtcataatcaaacatatgtttcatcctatggatatttttggttgttttgtttgttttctgagataaggtctcactattgctcaggctggagtacagtggcgtgatcacagctcactgtgcagcctcaacctcctgggctcaaggaatcctcctatctcagcttcccaagtagctgggaccacaggtgtacaccaccattcctggctaatttttttaaaaaaatttttgtaggccgggcatggtggctcacacctgtaatcccagcactttgggaggctgaggcgggtagatcacgaggtcaggagttcgagaccagcctggccaacgtggtaaaaccctgtctctactaaaaatacaaaaattagctgggcatggtggtggatgcctgcaatcccagctactcgggagctgaggcagagagtcgcttgaaccctggaggcggaggttgcagcgagccgagattgcaccactgcactccagcctgggcgacagagtgagattccgtctcaaaaaaaaaaatttttttttgtagagaaggtgtctcaccatgtttcccaggctggtcttgaactcctgggctcaagagatctgccccttggcctcccaaggtgttgtagtcacaggcatgggtcactgcacccggcccatcctgtggattttaaggatgatgagttggtgctaaatgagctcagagaactttcagtgctcaacattgagaccaatgaggaatgttttgtttgacagactcatggatggtgtggactctgtgttctggaggaatgcagaggaaacggattattatattcaagtcctccttggaaggtggtttgttgacccagacatggaataaggttacagactattaggttcaggggacctcaggaaaaaggaggaaaatctaaggggatgggaggctttcctcagtgcctgtgaggccaacagacactttcaatctccaatgtgtgtatgcttcagaaagggcaagatgttggctgtcctttcactctccaccagctgaaatgtggtctcttcccattatcgccattctgaccactcttcccaagtcacagacacttctcagatgccaaacccaaaaggcgtggctgaattcatttgcatcaactcaggcaatgaatttgggaggagagttcgcttgtcagaacgtaagaacgtcacattttgcagttggtaatgtggagtctagggacccttggaatcacttccctagctgatcgccagcacaccctctttcattcattcaatcacactttagcttaggtgcagctgggaagggacttcgcggatgtaattaaagtcacaaattggtttatcttgaggtaatccaaagggagactgtgcaggagaggtctgactcaatcacatccaaagccttcagtggtggctggagaggagaaaacacatttctgcacttaggaacctcctttctcacctcaattctagcagctcagatgaggtgtcagctccctgcaggctctggatgagtccgtggggccacagaaaaaagaactgcagaaaactcaggaataaaaatggagacagtgacacttccaagtaaaactactagaagtcttcagaaagtaaggcaagaaaaggaaacttgaggaccagagaagctgccaggccagttcattaagccttggcttgaccaggaaatccagtgttttcttgaaggatggaaaatctggagatgaagaatgggaatcatgtactgtcaaacgcagttgccaaggggttcaagcccaggggtgtgaagaagagctgagacctgcctacagatgccaagattgcagggctcatcctggactattaatgagaccatccagaggccaaggagcttacagggctcacctttggggatactggcccagcagtgctgcagatcctaccctgagtagagtgacatgagaactgggctgggggagttgaggagaaaaggaagtctcaaaggctctgtgtgtttgtgtgtgtgtgtgtgtgtgtgtgtgtgtgtgtgtctgtgtgtgtgtgtgtaaactggaaatggttaaactcccctgtgtgcagtggcataccaagcagggtggagtggggggaggaggctacactgcaaggggtattttgtcactaacatttttttataattgctggtgcgcagtatcaataaaaagttggcttcaggctgggcgcagtggctcacacctgtaatcctagcactttgggagggtgaggtgggcagatcacctgaggtcaggagttcaagaccagcctggccaacgtggtaaaaccccgtctctactaaaaacacaaaaattagcctggcgtggtggtgtgtgcctgtaatgccagctacctgggaggctgaggcaggagaatcactggaacccgggaggcagaggctgcagtgagccaagatggtgccactgcactccagcctgggccaaagagtcagactccatctcaaaaaaaaaaaaaaaaaaaaagttggttttagaattatttttaaattctccacagacaatacaccttcttattacctgcacctggaacaaccatccccactccctgcccatggtaagctgcagcctgtgtgtcctatgtgggtaaacagtccagctctaccagattgtaaatggggttggggggtcggggtagagggcatggcgagtaaggattatttttcgcataataacagttttatgcagcatggttttgtacaagagaagtgttttctaaatatttggcaaataaatgaataattgaatttgagtaataatgaagaaaatataagcaggaattttacaagaagacctttagtttaaacaagaagaaagcaagccaggcacggtggctcatgcctgtaatcccagcactttgggaggctgaggtgggtggatcacctgatgtcaggagttcaagaccagcctggccaacatggtgaaaccccatctctactaaatatacaaaaaaatagctgggcatggtggtggatgcctgcaatcccacctacttgggaggctgaggcaggagaatcacttgaacccgggaggcagaggttgcagtgagccaagattgtgccactgcactccagcctgggtgacagggcaagactccgtctcaaaaaaaaaaaaaaaaaaagaagaagaagaaggcattcctaattaccctggttgtaagataatacaaaacaggaaatgacagcatcattagagatttaaggtttcttaactttttacgtctaggacaggttttggaagtctggtgaagtctgtggagtgtcagaataatcttcaactgcataaagtaaaataaatgggattacaaaggaaaacaatcatattgaagtacagttgtcaaaatgaaacaaaatgtgtaagaagaagatctagtggtgagtctaaccactaccactaactacaaagtaaccgtgagcatacatgacattttgaaatttctgcaactactggaagatgacacaaatgtgtaaattctattaacaacagtcacatgtactacaaataccggtgtaggtttattgcctacatttatcattggagaaaatgctaaatttcagttagagattagtgaaaatgaaatgtaattttctcctatttttgtttgccctttgggatcctggatgaagagccctgcattacactgggcacagtggctcatgcctgcaatcccagctactaaggaggctgaggtaggaggatcgctggagcctaggaagttgaggctacagtgagccgtgatcgtgccactcactgcactccagcctcggcaatagagcgaaacccagaaagaagaaagaaaagaaaagagagagagaaggaaggaaggagaaagaaagagaagaaagaagaaaggagggagggagggaaggagggaggaaggaaggaaggaaagaaggaaagaaggaaggaaggaaagaaggaaagaaggaaagaaaagaatgaaaggccaggcacggcagcttactcctgtaatcccagcactttgggaggccaaggcaggtggatcacctgaggttgggagtttgagacgagcctgaccaacaaggagaaaccccatctctactaaaaatacaaaattagctgggcatggtggcacatgcctgtaatcccagctactcgggaggctgaggcacgagaattgcttggcccagggaggtggcagttgtggtgagctgagatcgtgccgttgcactctagcctgggcaacaagagtgaaactccgtctcaaaaaaaaaaagaaagaaagaaaagaaaagaaaagaaagaaagaaagaaagaaagaaagaaagaaagaaagaaagaaagaaagaaagaaagaagaaagaaagaaagaaagaaagaaagaaggaaaatagctctgcatgagagccagtgatgtctcagagtgggaaggaagccaggtcaacatgttgcccctaccaacaagcccttaggttgacaggaggtgcctctcccagctttacattcagagccaacctccccaggaggctcttttccatcctaagccttgtttcagggatcagggagtggcaactctccacatgcctgcatgcttccatctgaaccaatgttgaaggctcttctactattcaaagcccctaaggatgtaacatttggagaaaatatgctaaaaagacctggtactcagagacaattttctccaaatgtttgaatgggagcatcaaatgagtccccagccttgaaggttgggttggtctggggaggaaaactaattgtcctttcagctcagctatatcatcagtcccaaggcagacgttcagaagattcttttctagttcatagggaaaatgacacttaatcctatgagagccccaaaggcagaggacatgggatgtggtatcaggaacctggaagacatgcttttgcaatggggtacacagcacttaagtgagggaaaccaccaggaagtggcactggccctggaattcccttcatgtcacacagggacagagaggaaactaacattttctaaggacttattccataccaggggctgcacattctgtgtcttatatctattacaaactgtttcttcataaggcaggtgatttgtttttcttttcttcttttctttcttttttttttttttttttgagacagggtctccctctgtcacctgggctggagtctagtggtgccatctcggctcactgcaacctctgcctccccaagcaatcctcctgcctctcagcctccggagtagctgggattactggcatgcaccaccacacccagctaatttttgtatttttggtagagacagagtttcgccatgttgctcaggctagtctcgaactcctgtgctcaagtgatctgcccacctcagcctcccaaagtgctaggattacaggcgtggaccaccatgccctgcctgttttgtgatctgcccgcctcggcctcccaaagtgctgggattacaggcatgagccaccacgcctggctagtgcctgtatgtgtgtatgtgtgtgtgtatgtatgtatatatatatatatatatatatatatatatatatatatatatatatatatatttttttttttttttttttttttttttttgagacagaatcttgctcttttgcccagactggagtgaaatggtgtgatcttggctcactgccaacttctgccccctgagttcaagcaattctcctgcctcagcctcccaagtagttgggattacaggcacctgccaccatgcctggctaatttttgtatttttagtagggacagggttttgccatgttggccaggctggtctcaaattcctgacctcaggtgatccacctgcctcagcctcccaagtagttgggattacaggcgcctgccaccatgcctggctaatttttttatttttagtagagacacggttttgccatgttggccaggctggtctcaaattcctgacctcaggtgatccacctgcctcagcctcccaaagtgttaggattacaggcgtgagccaccgcacccagccttttcatatatatatatatatatatatacttttttttttgagacagagtttcgctcttgttgcccaggctggagtgcaatggcgcaatcttggctcaccacaacctcctctgggttagggcaattctcctgcctcagcctctcgagtagctgagattacaggtatgtgccaccatgcctagctgattttttatatttttagtagagatggggtttctccatgttggtcaggctggtcttgaactccaaaaccgcaggtgatccgcccacctcagcctcccaaagtgctgggattacaggcgtgagccaccgcgcagggcctcttttcatatatttttaactaaattaataaaacagctggggcagtggctcatgcctgtaattccaacactttgggaggccgaggtaggagatcacttgagctcaggagttcaagaccagcctgggcaacatggtgaaacctcgtttaccaaaaaatacaaaaattagccaggtgtggtggcacatgactgtagtcccagctatcccagaggctgaggtgggaggattgcttaaatccatgaggtcgaggctgcagtaaactgtgatcatgccactgcattccagcctgggtaactgagcaagactctgtctcaaaaaactaaaaactaggcaggcgtggtggctcatgcctgtaatcccagcactttgggaggccgaggcaggcagatcacatgaggccaggagtttgagaccagcccagccaacatggcaaacatgtatttcagtgtctactgaaaatacaaaaattagctggatgtggtggtgcgtgccagtaatcccagctactcagtaggctaagccaggggaatcgcttgaacccgggaggcagaggttgcagtgagccgagatggtgcctctgcactccagcctgggcaacagagcgagaccctgtctcaaaaacacaaacaaataaagaaaactccaaaaaactgaaaagtaaataaataaataaaacaaaacaaaatgtggaagcaatagcaaaggcttgaccttgctccaaaatcacaggttttttttaagctgtgttcttataaacttccaaatgagatgaagataaacttctgctgagaggggcatggtcatgacttacagtttgggcaggacaaagtattttccatcacacacacacacacacacacacacacacacacacacacactcaccttcacacatacggtgttatttctactaagttgtacttgattcttctccagtggctctgtctggagtttatttaatgttactagtttgccaatgaatagactaagacaataagcaattttgcttttatttctttattttaaaaaactgcttgttagtcttatgagaaaacaaagtgaagaataaaggtaactactgcatgtaccacagtagcgagagaaaaaagagtgtcaattaatctaattgatagtcagaggattgcatggctattagtgatggagtcgggatttgggcacgtgtacatttgttggattttgcagcctggcatctatatcccatttgtctggtggcaagatcccatttttgcgttggggccattatcctccaacattgggtagtctatggtactattcctcaagggaccctccccttcctcagatgagtgtgagcacctgacccaccctaagcctattggagttctctctttttgatccaaagtagaagcactgaccattggtgtctgctgcctggatgctggaactatcctggcttctgtcctttccaaagaccgcctgttcagcttttccttcagttctgtaaatattttttcaataatttactattacttattaatctgttgcttctctacaaccggctgcctcctcagctccatgactcccagcctggagtcatagaacaaaagctgaatgtgggcacagaaggttcagccactgagtgcctatatggttttgaactcattatttgaaattcaagctcattacctgaaacaggaagaacacctcctcataaggctggtatgtgaattcaattagatgaaatatgtgctctccgagatcaaggactttgatttagtctctgctgaatccgcagtgcctatcacagaacacagagaagagcttcaataaatgtgttggtttaatgacaactgcttctgaaaacactttgttaacgctagtacgtaacatgaatagctgtgtccattatgtccagggtgaagtcagccaatttcgattctcctctccttaaagttttgtcttgctttctctttctttccttgaatcttcacactaaatctactttgttttttaattttttaaaaagagatagggtctcactctgtcacccaggctggagtgcagtagtgcaatcatagctcactgcaatctctaactcctgttctcaagcaatcctcctgcctcagcctcacaactagctgggaccacaggcatgggccaccatgcttggctttttgcttttttttttttttttttttggtagagatgggtctccctatgttgcccaggctagtctcaaactcctgtgctcaagatcctctggcctctgccttccaaaaggattacaggcatgagtcaccaccctgggcctctgactactttattttaaagcccagccaatttatatctttttattattattattattattatttttgagacagagtctcactgtcacccaggctggagtgcagtggccatctcggctcattacaacctccgcctcccaggttcaagcgactctcctgactcagccaccctagtagctgggattataggcaggcaccaccacgccaggctaatttttgtatttttagtagagatgggttttcgccatattggccaggctggtctagaactcctggccttaagggatcttcccgcctcggcttcccaaagttctgggatcccaggtgtcagccacctcgccaggctgcttgatatcttaaaatcagaaaagccacccatcttaagtggagggtgggtgggtccatatttacaggaatggaagaaaggaggatgttccctctcttttgtccacgttcagcagctctgaaattaatgccaaggcgagcaaacgcccgccccccaccccctgccgccctcgccttatgccgagactttgctgttgaacacgaagtaaacgtttcccagaaagcccagtttaagaaacaattcagggcgaggtgagggcacaaaggtagagaaataaggggaaatgatatttctttaaagaacagagatccctgaatagcaccgggggccgttacagcccatgaggacatctccgagtccttctatatgacactagggacccccgtgccatatacagacactgttctcagagattaggagggggaaagaggatattgccacagttctgtccttcgaaatgactccagatgcttctgagtctgtgaggcccctgtgtccgtcatcagcaaaacaagtgagggagaagtttgaggagtgatgaccctagcagttatgggtttaagcctgggaatcttaagccacagagcagaggatttgggggctgaagaaaaagaccctccgcagcttcagcgcgaagagggcggcggggaccggggtggtgggggtggaacctcgccgccttccgaagcaggagtaagctgcagaggctgcgcgggggtttgagcggagcgagaacagctccttcccttgatcatgctgccctccggaggtcagtttaggtatcgccgctccctttcacgctgttttgtctcttcaccgtctgttctggatcatcctgtccagagagaccgttgggtcagagggttcctgtggacccctggggcgagcttaatgtccccgaaaactgcgtgctccagtatcacttgaatgcccaccgggttccggaatcacgagtctccagagctgtcccttcgccccacggctcacattccaggtctgcccctcagtgacttctgcaacaacacgcgcttctcgatcagctctgaggatttgggttctgcgacggacaggggaaggaaagaaggaaggctgtgaagaaccgtggtgcctgcctgcacagccctcctcgcgtgcgagcattagttggctaaagtcgcctgtctcgacagtctcccctgcggggtatctggggaccctttctttgggaatccacgctctttgtcagagtagccaatgcctctcctgtccaaaatctcatacccttggcccttctcccgtcctcgcgctgaggctggagtcaggtcaaatgtcagaacatctggatgtcccaagagtgacacctgggagtgggtgggcaagaaaccagtagcgggaagggaaagtggaggagcagaggattcccggggccggcgtctggggtgagctcgcggcccctcagagcctggcacatcgccgcctggcatccggcaggcgtgagggaacgcatagcgcagcgagtcaggcggggtaaacccggagcaacgcggaggcggtgatctgggcaagggcgaggtcagttaaggacgcagttctggccccgccctcaaggcacgcctggccaatcaggaatcgctgattcaccaagcctctcctcctgcgctcgccctcttctgcacttcggtctcaggcgcaaacacgttcaaagtcgctaggccaaagcgctgagatacggtttcccaagccaattagagagcggctctcggatatggggcggaaccctgaaaaggcgagagctgagatgccgctccgttctgccttaccacgccgccccccagcgtccgccaattaggagagcccggagccggatccactctcagcctcaggaagcagcagcctccgctccgcggcgggtgtgctcggcagtcacagacccactcaggacacctcccgttgccgacgggctagacctgcatccgaagggcctaagcggggaggaaccgctttccaccactctccagggacctggggagggaatgtttaggccgtaggggtggaggacacaggaaacgtaacatttttccttaactgcgcctctcttcttaggccttaaaggggtccccgtgtctctccagtctagagcctaagttcaaacgaggcgtataggcgaggacagcaggaaggctccaagtcaaacaaacggatggtacgaatttcgcctggtctagccctgccccaacggtgtgggtgtgggttgggtgctgcagcccccgagcaaggggctgtcacagccacaaccagaggagctatggagctgctacggaggagggattccagagtcagcttgggcttgtcccaagggagcccttgggacagtgtctggggctgcgcggcctggttctcatcccttgcagcatctgctattttagccaggggccaccttcctccaatggcctgggagtagctagaggttagaggttacacccaccagaagggatgtaagcccaggaagtagtcagaaaggaaaggtcattctagagatggggccacctgaaaaaccttcaggaggaaggagaaaggaaatgggataagtgtcatgtcatactaaatatttattttctgcagactgacttcggagtaattcttgagccaggaggggagaggttagtgttcaaattgctgagatcttaggtcaaaaagctacagaaaagaaatcactttgaaaaacacaatgactcagaggcagtcaccccttgccagcaattccaagagctgaggaggcttcatgcctcaggacatggtgactagttgagtgaaccagagattgaggcagtggtttttacaggggaagaaacaagccttgggtgtatgggagcaggaaaggagggtgacagactggagaaatgataaaggccattttggaagcccacagggaagtggtcttgggaaacctgaagacactgggatattcagaaggccaaggggatccagcttatcctgttgggcaaggtgctgggagtgaaggcaggtaagccatgtcaagggcctgggaagcaaggggaaaactggaaggggtaccccaggtgaagaagggtatggaatggggtgcagaagtccatggagatgaccggcagatctcagggcggtttctggcacatcagaagttgggcttatgcttcttgagctccaccataaggtggtgaatgttgatgagctcagcccgggcagggagggctcggagctgcggctgggacagcacccggtggaagcgatgatagagctggatcagctgggtcagcgctccctggtcaaagaaagtcattgagggatcaaaccgtaaaatggtgctaatagtgatgattaagaatcaggttaggcggccaggcgcagtggctcacacttgtaatcccagcactgtgggaggccatggcgggcagatcacgaggtcaggaattcgagaccagcctggccaacacagtgaaaccccatctctactacaaatacgaaaattagctggttgtggtggcaggcacctgtaatcccagctacttgggaggctgaggcaggaaaatcacttgaacctgggaggcagaggttgcagtgagccgagactgtgccactgcactccagcctggacaacagagctagactctgtctcaaaaaaaaaacaaaacaaacaaaaaaaaaagaatcaggttagggctcatacagaactttgggcacagctagtaactgaagaccaagggtcacttagatgatgctgagcccagcaaaaagatggggaaaataattaatgatgggggatctgagtggggcctgggacttgcaggtcacctgaatgatactggtgccatttctgaagttggtgaaactccgcattacatcctgactcagagattccactgatgatttccaggaactaccaaagccacggatcagctgagttacccgggctaatagcaggaggaaacagtgtcagagagggatctggctgatcttcaactccactaagttctccccaaggtatagccatccttatcatcaaaccctcttttctggtattctctcaatccagtctttcatactctattcccccaccatgtaatctgcatcctttcatttttcttttccacttcccttaccactgatcccatcattaccatattttcctcataccttcttcccctcgaagtcgctcagcctgtccacgctcaatcaaagcctcagcctccttcacaaatgccactaaacccccaaaagggggagacagcaactcttcaatgaattcctggaaagacacaaacacatatacacaggtgtcctggtgtcagcagatttgcccaattctggcatcatgactaatgtagatccatctgaatggcatctttcagctgctgcaaaagttaaggaaaatcctctatggagaaaaatatcctcaatcctaattttggcccatacagttcccctggttaagatcaaacaatgaactcaaagatcactagacacaaaagaagggcagctaccaagagagtcagcagacacaataagcaatagctgctgaccttaagaactatccgatacggatagcagttgtactgtgtgcaatgtctaaagttaaggataggccgggcacagtggctcacgcctgtaatcccagcactttgggaggctgaggtgggcagatcacctgaggtcaggagttcaagaccagcctggccaacatgatgaaaccccatctctactaaaaatacaaaaattagctgggcatgatggtggatgcctataatcccagctactcgggagactgaggcaagagaatcacttgaacttgggaggcggaggttgcagtgagcagagatcatgccactgcactccagcctggatgacagagcaagactccgtctcaaaaaaaaaaaaaaaaaaaaaggatgtaaaaatgaccaattagtaagaactatgaggaatgaacagacttgaaaaaaggaaatttttttagatatgaaaagccagttttagaaagtcaacagattaacaagaattatacaatgaattagaatttataactgaagaaaggactcagaatgtagcacagacagaagatggaaaattttgagatagtaggagatacagaaatctaattaatgtatctaggcactgaaattgatggctactaacatcacaaagagagccaagaagacattatgtgcttcctgatggaaatacataccactacctctcaaatatccctgtagaaaaaaaaaaactaatttaaatctgaccaagcctttccatctaattacacacttatgagaaatacaccagacagaggaagtttggccacaccatggaatgcagtcagcaaaatctaaactgtacatcattctagatgacaaatgactcaataactcagtttcttccaaaaataaattgcagaggagatggaagggaaatctatagactaaaaaaagacacatatatggactttatatggatcctgatttgaaccataaaaatcatttatgaaggccaggcacagtggctcatgcctgtaatcccagcattttgggaggctgaggcgggtagatcacctgaggtcaggagtttgagaccagcctggccaacatggtgaaatcctgtctctactaaaaatacaaaaattagctgggcgtggtggtgggtgtctataatcccagctactcaggagactgaggcaggagaattgcttgaacccgggaggcagatgttggagtgtgccaagatcgggccattgcactccagcctggaggcaacaagagtgaaactgtgtctcaaaaaaaaaaaaaaaaaaatcacttatgaaataactgggaaaatctgaatagttattttagataagataatttttttaagtgtgataatgtattgtagtttttaaaaccatctgttaccaggtgtggtggcacacacctgtagtcccagttacttaggaggctgaggtgggaggatcacttgagcccaggagttcgaggctgcagggagttatatcatgctactacactccagcctgggcactacagcaaggccctatctcaaaaataattttcttaataaaaataacattctgatacagatgaagtgataatattcatctgtatatgtataagatttaattcaaagtaactgggggacacagaaggaggataagcaataggtgttggtatagatgaaacaaaactgtccgtgaactgctatacaccgaatatcactgatgatgcctgggggttcactatgcttttctaatagcatagtgaaatttcccataataaaatgttaatttttgtttaatgtaaaagggagattcaaacaaaaaaactcataaaagcaaacaacccagacagaaagatctggtaagaagaaagtgaaattattattccatttaaaaataaattattaatactaaaattagccaggtgtggtggtgcatgcctgtaaccccagctactcagggagactgaagcagaagaatcacttgaaccgggaggcagaggttgtagtgagccaagatcatgtcactgcactccagcctgggcgacagagcagcaacttgtctcagtaaataaataaataaataaataaataaaaattgtatcttttctattcttccctcaaaatattcacttatatccactgagggtgtcaaataactaatatgctgcaaggaaggatctttctataatcaaggcatctttgtgatgtgattttggacagagattaaataaccaaattcaacctattacagttgcctaaatgcagtctcacacacacatatacaaacaataatgtagcagtgtacggtggggcacagggagtagacttgccaaagaaaagttgaactaacagtgatgacccctgctaggcaggagccataaattatataatgtgttgtaagcatgatatatacacctgattttgaagacttcatcttagaataaattttaagtatatcttttttttctttttttttttcggaaacagggtcttgctccatcacccacgctggagtgcagtggcacaatcacagctcactacaacctcaactttcctggctcagtgattatcccacctcagcctcctgagtagctgggactaacaggcatgtgccaacatgtcccactcattttttttttattttttgtagagatggggtttcaccatgttgtccaggctggtctcaaactcctgggctcaagcgatcctccctgccttggcctgtgctgggattacaggtgtgagccaccgtgctggcctcagtactattttttattgattatatgttgaaataataatattttggatgtagtggtttaaaaaattatttcatctgtttctccttactttttaatgtagcttctagaaaatttaaaattatttaagtggctcacatttgtggcatgcattatattcctataggagtactggtctggacttagatgaactttaagctttctataacgcaaaagagaacaccttgatagcagaggagtgaccagaggaaacagtgcactgggctttaacaatctttcctacgtagtatgaagcagcagctgaccaaaaaggaccagaagcattgatggcagctggcgagtctctatacctggcaaatccagtgacaaatcccagctgctctcagcagaaacaactggtttaagtgcatctttgtgggtgccttaatctcctgcaatgatcccgcctcagcctcccaagcagctagaactacaaatgcatgccactacgcctggcttttttttttttttttttttttttttaaagaaatggggtcttagccgggcatggtggctaacacctgtaatcccagcactttgggaggccaaggcgggcagatgacgaggtcagatcaagaccatcctggctaacatggtgaaaccccccgtctctactaaaaatacaaaatacaaaaaaaataccgggcatggtgctgggcacctgtagtctcagctactcgggaggctgaggcaggaagaatggcatgaacccgggaggcggagcttgcagtgagctgagattgcaccactgcaccactccagcctgggagacagagggagactctgtctaaaaaaaaaaaaaaaaaaaagaaatggagtctcactatgttgcccaggcagatcccctcaaactctcaaactcctgggctcaagagattctcccatctcagcatcccaaagtgctgggattacaggcatgagccacagcaccagcaacaattctttcaaaatcaggaatatgaaaagggttctcactatcacctttctgttcaacttctaaacatcatcctgggagtgttagccagtagaataagaaatcaaaaacataagatgttaaagacaaaaaactagaaaagatttatttattcctagtagaactaaacatacgtattatacccacctaaaaatatggcaaacgacttacagtgtctttgtgctgaaaatttaaaaaggttatcaaaagacattaaaagactctcttaaaaattggaggaggaggccaggtggagtggctcacatctgtaatcccagtttagtgagacactacaaaaaattaaatttttaaattttgtattctctacagaaaaaaaaaagccaagtgtggtgctgtgtgcctctagtcctagctactcgggaggctgagacaagagaagcacttgaacccaggaattcaaggctgcagtgagctatgattgtgccactgcactccaacctgagtgacagagcaaaacctgtctcaaaaaaaaaaaaaaaaaaaaaaaaaaaaaaaaaaaaaaaaggatagggagcccatgatcatgatcatggataggaagtttcaatatcataaagtatcaattcttccaaattagtctatagacaatgtaattctaatcaaaatccttaaagactttttaaaatgtgaaaacttttcgagaccagcctagccaacacggtgaaaccccatctctactaaaaatacaaaaattagctgggtgtggtggcacatgcctgtaatcctagctactcaggaggctgaggcaggagaatcacttgaacccaggaggcagaggttgcagtgcgctgagattgtggccctgcactccagcctgggtgacaagagtgagactctgtctaaaaaaaaaaaaaaagaaaagaaaaaaaaagaaaagaaaaagattttctataaatggttctgggccaaccatccacataaaaaaaagaaatagatccctacctcacatcacacacaaaaattaattccaagtaaatttgagacttaaaggtaacaaaaaaattctctctatatatttgtttattctttaattttattattattttttgagacagggtctcactctgttgcccaggctggagtgcagcagcacaaacagggctcactgcagcctcgacctcccaggctcaagtgatcctcccacctcagctacctgagtagcagagactacaggtgtgtgccactatgcttggctaatatatttttttaattttttgtagagatgaggtctcactatactgcctaggctggtctcaaactcctggcttcaagcaatcttcctgccttggcctcccaaagtgctgggattacaggctttagccactgcacctggccaaaattctacaatattaagaagaaaatgtagcataatatttttctggccttggagtaataaggaatttcattttttttttttttaaacggagtctcactctatcaccagtctggagtgcagtggcacgatcttggctcactgcatcctccacctccctggttcaagtgattctcctgcctcagcctcatgagtagctaggactacaggtacgcatcaccacgcccagctaatttttttgtatttttagtagagacgaggtttcaccatgttggccaggatggtctcgatcccgtgacctcgtaatccacccgcctcagcctcccaaagtactgggattacaggcgtgagccaccacacccagcccaggaatttcttaaacaggacaaaaatagtcaggcgtggtagatggtggctgtaagcccagcactttgggaggctgatgcgggaggatcacttgaggccaggagtttgagaccagcctgggcaacatagtgagactctgtctctacaaaacaacaacaacaacaaaaattagctgggcatatggcacacacctgtagtcctagttacttgggaggctgagggaggagggttgcctgagcccaggaggttgaggctacagtgagccatgatcacactactgcattccagcttgggtgacagagcaagactgttactaaaaacaaagacataaaaatgaaggacagataaattcaatcatattaaaattacaaatttctttaatcaaaaagcaacattaaaaaaacaaaggctggacgcggtggctcatgcctgtaatcccagcattttgggaggctgaggcggatggatcacctgaggtcaggcgttcaagactggcctggccaacatggcaaaacccatctctactaaatatacaaaaattagccgggcgtggtagcacacgcctgtaatcccagctactcaggaggctgagaaaggataagtgcttgaacccgggaggcagaggtgcagtgagctgagatcacaccattgcactccagcctcggcaacatgagtgaaactccatctcaaaaaaaaaaaaaaaaaggtgcaaggatttcttgagcccaggagcctgggcaacacagaaagaccctcatctcaccaaaaaaaaaaaaaaaagtaaaaagatacatactaaaagataatctgtaacctacgtataatcaacaagattagtatgtagatgatgcaaagaactcttataaataaaaaatactagcagacttatttttttctttattttttgagagagtcacgctctgtaactgaggctggagtgcagtggcataatcttggctcactgcaacctccgcctcccaggttcagcgcccctgaggagctgggactacaggcatgcgccactatgcctggttaatttttgtacttctagtagagacagggttctgccatgctggccaggctggtcttgaattactggcctcaactgatccatccgcctcagcctcccaaagtgctgggattacaggtgtacaccctgcccagccacaagccgatttttaaaaggtcaaatgctatgacagccattttacaggaaaaaaaaaaattgtatagttgtggtgacgctcctcacacagagcaccagcttcagggagtctgtcccttgcagacccctgacccggcaacggatgaatgaggtacactgacacacagatactctgctttgccagtccagctgagtgtgtccaggctgtttacagactccctgaagagtactgtaaacagttgcaatggcggccctgaccagctagtgagactcgcatttattcagtaaagattaattgacaaagacttgagtcaacaccactacggggtaactgacattgtggacttcctgagtagaaagcagttaagcacctgcggtacatcaaagattagtcttaagaccatatgagtaaacaagctacctagataacttccccacattcctttgttattactctaatttatttaactaaaggtaaagatcaggtcgccttcaaccatatctattactgaagttatgcaaactcttaggccttccaagagggtttgtggctatcatcactaatatttttcccaccagcctgactgaacccctacatatagttactaaacatttgaaatgatgctcaatgttattagtaatcagaaaattacaaataaaacccactgaaatacaggttgagtatccctaatccaataatctgaaatccaaaatgctccaaaatccggaagtttttgagtatcaacatgatgctcaaaggtaatgctctttggagcatttcagatttcagattttcagactacagatgctaaccagtaaaaataatgcaaggaatccaaaatccgaaaaaaatcaaaatctgaaacatttctgatcccgagcatctttagcagcatccttggtctctaaaaaaaaaaagaaaaaaaatggcaaagacctgataataccacatgttggagaaaatgtggctcagtaggaattcttacatattgctggtgagaaggaactacttaggaaaacaatttatcattgtctcataaagactaatactgcatatcttattagcagcaagactactgtcctaggtttatacccaagagaaacttttgatgaagataatcaatatctatgtgtgctaaaagacatgattattcataaaacaatgctcacagaagcaagaaactggaaacaatccatttatagaatatgtttaatcacacaagtcatatatggcagtgaaaaggaatgagctatagccatatgcaataacatgacaatattagaaaaattatgcatgaaaaaaatcctgtgattctggggttttttgttttgttttgctgtttgagacagggtcttgctgtgttgccaagggtagactacaatgtcatgatcatggctcgctgtaatctcgaactcctggatttcaaagtggtcctctcgcctttgtctcccaaatagctagaactacaggtgcataccaccatgcctggcttttttttttttcttttttgccttgctgttttcttgccttgtctcatcagtgtttatatcattaaaaaataaaacaacccagtgcagtggctgttttgttttttaatgatataaacactcacaaacacaccacacaatccaagtagcagcagcttggcaaaagtcaccatcaaactatgaaatcctactgaaaccatccctgtgcttctcgtgcacaggtactcgttgatctaaatgttgcatttattgtgttcttgcttttttccccctttttttgtgtgtgttcttgcttttaaaagtaaagctatatatatgccaaaacaaaaattcgttgttttccagtgtcattaaaaacagaatctaggccgggtgcagtgactcatgcctataatcccagcactttgggaggctgaggcgggtgaatcacctgaggtcaggagttttaagaccagctgggccaacatggtgaaaccccatctctactaaaaatacaaaaattagctggacatggtggcacgtgcctgcagtcccagctactcagaggctgaggcaggagaatcacttaacctgggaggcggacgttgcagtgagctgacatcgtatcgctgcactccagtgtgggagtcagagtgagactccgtctttaaaaaaaaaaaagaatcataagatttttcacttgagggcagtaattcaagaccagcccaggcaacagttgtcttttgtaaagacaactgtctttacaaaattaaaaaattagctggcacacacctacagtaaactcatttttggtaaaagtgccaagaacatacactggggaaaagatagtctcttggtcaggcacggtagctcacgcctgtaatcccagcacttgggaggcccaggtgggaggatcacttgaagtcaggagttcaagacaagcctggctaacatggtgaaatcccgtctctactaaaaacacaaaaactagcccggcgtggtggcaggcatcagtaatcccaactattcaggaggctgaggcaggagaatcacttgaaccaaggaggcagaggttgcagtgagccaatactgcaccactgcactccagcctaggtgacagagcaagactccgtctgaaaaaaaaaaaaagagagatagtctcttcaataatggtgctgggaaaactggctatccattacacagaagaatgaaactatacccctatctctcgccacatatgaaaaccaaatcaaatggattaaagacttaaatctaagaccaaattatgaaactactacaagaaaacactggggaaaatctccaagacacgggtctgggcaaaaatttcttgagccataccccacaagcacaggcaaccaaagcaaaaatggccaaatgggatcacgtcaagttacaaagcttctgcacagctgggcacggtggctcacgcctgtaatcccagcactttgggagacagagctgggcagatcacctgaggtcaggagtttgagaccagcctgaccaacatggtgaaaccccatctctactaaaaatacaaaattagccaggcatggtggcacatgcctgtaatcacagctactcaggaggctgaggcaggaaaattgcttgaacctgggaggcggaggttgcggtgagctgagatcgcaccatcgcactccagcctggacaacaagaacaaaactccatctcaaaaaaaaaaaaaaaaaaaaaaaaagcttctgcacagctaaagaaacaataaagtgaagagacaaagaatatttgcacatcccatctgccaagggattaataaccagaatatataaggggctcaaacaactctacatgacagtctaataatcctattaaaaaatgggcaaaagatttgaatagatatttttcaaaagaatacaaatggcaaacagacatatatgaaaaggggctcaccatcactattatcagagaaatacaaatcaaaactacaatgagatctcatctcactccagtcagaatggcttttatccaaaagacaggcaatagcaatgctggcaaggatgtggagaaaagggaacccttatacactgttggtgggaatgtagattagtacaaacactttggagaacagtttgaaggttgctcaaaaaactaaaagtagagctaccatatgattcagcaatcccactgctgggtatatacccaaaagaaaggaaatcagtacattgaagagatatttgcactcccatgtttgttgcagtattgttcacaatagctaagatttggaagcaacctaagtgtccatcaacagatgaatgggtaaagaaaatgtgggatatatacacaatggagtactactcagccataaaaaagaatgagactcagtcatttgcaacaacatgcatagaattggaaattattatattaagtgaaataagccaggcacagaaagacaaacgtcatgtgttctcactgattcgtggaatctaaaaatcaaaacaattgaactcatgtactcatgtacgaagagagtagaaggatggctaccagaggctgggaaggctagtggaaggctggggagaaggtggggatgattaatgggtacaaacaaaaataggaagaataaataagacctactatttgacagcacaacagggtgactatagtcaattataacttaattgtacattttaaaataacttagtgtaatcggattgtttataacacaaaggataaatgcttgagaggatagataaagaaaaaaataaaattcattctaaaaataaaaaattagctaggcatggtggctcgcacctgtggtcccagctacccagggggctaaggtagaaggatcacttaagcccaggctgttgaggctgcagtgagccatgttcatgccactgcactccagcctgggtgacagagtgacactttgcctcaaaaaaaaaaaaaaaaaaaaaccaaagacaaaataaaataaaatagaccaataatgacagtatgttgtgaatcaagagttacagtaattccgcatacctgagatccattatgccactccctacacacacacacacacacacacacacacacagagagagagagagagagagctgaaaacagcacagaaggctgtctcttcccttttccccacacccctacctgtgtccgagcattgagcagctgctggaagctctcaacctctttgctgtcatctgcagcccgctcctaagggaagacaaagggaaatgtctagtttggggaaagcagtccttcacttcaggatgtccccttcattccacacttattgtactaagctggacactgtgccagactccaagagtaaaacactgaacaagacaggcatcatctctgccctcacagagctaacagcagtgggggaaaccgaattttctgggtaggaaggcaaggagaaggagcacctattaccatcagcacacccagcatcatgtcatagttgttgatcagaaacacaagctgctccttccttgaggagaactcagctgccactcggaggacaaaattctccacctccacctgaaaaggcagagaggaagaggtgacaccagaaagcaaggtcatctgggccccatctggctcctcctcagactccacccactggaagcagccctgctgctgggaagtgtctcctgtccgaccctcacctgcagctgtcccagcaattgcatggtccgttcattaggaattgtctggttgatactgacaagagcggaggagaactctgcatagcggcgtgtgatctaggagagagtgggaaggaaaatcacacccacctcctggcccaaccaacacaacctcccaacttccttagccaacccacctccatgtgatgtgactctaccttcagtccctcctacccacagtgcaccactcaccatgagtttcaccaccctcccagaacacctgctcatagcgtggcccatgacacaactgtgaccttggccaacccccacaatgatgcttagagccctgcctttcaagaaccctttgttacccttgccctccctcacatagtggggccgagtatccaacccccctaggcgctgggggtcagtgcttcggacgctctgaacattcatctccaggatcagttcaaaccgtggccatagcaaggcaagcacctgttcccagtacctgtgggcttaatcagaatcagaggtcagccagcaaggaatgttggagggggatgggagggagtggggcatcattcagtttaatggtcaatagctagttgtgggggttggggggcagtggttggagaaaggtgagtcaaaaagcagcactactgcctccggagcaaatgaatgggaataaaggttgatgataccaggtcagtaggagtctaaggtcagggcagagtcatgcaagaccaagagagttcgtggcctgttgggcatcaaggaccagaattcagtgacctgtccagggcaggaacatccctctttgctgcaatgttacggaaccggagaacaatgtggatacagagaaaaacagcaatggcatcgtagcagtcagctagataagaatccaggtgtttctgtgtgattggggaacaaacagaggattaaaagagaatgtcagtttgttgtcctcagtgactatgaacaaacgcatttgtttctttggggatgatgcactggacaggacagaagggagagacgtaaaatggaactgccccctgctttcctgtccaggatctatgtttttggctttttttttgttttttgagatagagtttcactcttgccacccaagctggaatgcagtggcacaatctcggctcactgcaacctccgcctgcctcccaggttcaagcaattctcctgcctcagcctcctgagtagctggaattataggcgcctgccaccacgcccgactaatttttgtattttagtagagatggggtttcatcatgttggtcaagctggtctcgaactcctgacctcaggcgatccgcccacctcagcctcctaaagtgctgggattacaggtgtgagccactgcacccggtgttttcggctttagagacaggttgttttgtcacctaggctggattgtaatggtacaatcatagttcactgcagcctcaaacatctgggctcaagtgatgttcccacctcagcctgccaagcaactgggaccatgggtgtgtaccaccatgcctggttaagtttatttttaaattttttgtagagacaaggtcttgccgcattgcccaggctggtctcgaactcctggcctcaagcaaccttcctgccttggtctcccaaagtactgggattgcaggcataagccactgcacctggccacaccaggatctatgatcacaagcctatcacagcagagttcagggctgagcttgggtcaggggtttgagcaccaagatttgggggaccctcagttttcacgtgctattgcctgattgtgggtcagcagtaggggtagtctcagggaccctacgcactgaggatttcatgggggagtaacactgtgacaagtctaagtaacaagttttttttttgagatggagtctcgctctgtcacccaggctggagtgcaatggcgcaatcttggctcactgcaatctcctcctcccaggttcaagcaatcctcctgcctcagcctcccgagtagctgggattacaggccgcgcacacctggctaatttttgtactgttagtagagacagggtttcatcatgttggtcaggctggtctcaaactcctgaccttgtgatcctcccgcctcagcctcccaaagtgctgggattacaggcgtaagccactgcacctggctatttttttttttttttttttttgagacaggtctcactctggagtgcatggctcactgcagccttgacctcctgggctcaagcaatccttccacctcagcatctttagtagctgtgaccacaggcacacatcaacacacacccggctaatttttcattttttgtagagatgaggttgttgcccaggctggtctcaaactcctgagctcaggcaatcctactgccttggactcccaaagtgctgggattatgggtgtgcactaccacgcccagccaaggcttagacattttagaatgaggcgatcctgatttcagttctaccagagtcatgaccccactatgctgctgatgaagactggggacaaaggtgttgaatggtacaggaaacaggagtcttaccagggtcatgctgagtgtacggcccatgacagcatggaacaggtcgtgtgcagctgggccagacacaacaaaaaattcacagatgaaaaggtattcgcggcaggaattgtctaggagggcgtagtgctggctgcggaagagggcctcaaatggatactgggagaggaggagtaaagaagaaaaacagaagggatggaccccaacactgacttcccatggatatggctggaaaatcagtaaacctgagtaataagagctaggcagacccttcgcatctatctaggtccgggctgtctaagagcaagctgaatgggcactgaaaaggtgggggaacataggggtacaaaaagggcctacacccacctgctgttgctactcctgcatccacctcaacacctgcctctgactgtcattcccctcatccagtctctcccctctgcatgcccttaagtcaatggttcccagctcttttcacatcacagcaggctggagtgattggagaaggccactcccaagtctaaggggattaagacagggcctgcaggttgggaagctctgccctgaggtctggccttccctccccaccgtgctcagagcctctttcgtgactgaagcttgttcctcctcataccctctgctctccgcgctgcgctgtgtgaggcaccaggatgggggcctcaagttcagtgggggagatgacagagccgcgggttcctagggtgaaaatggtgttcctgctgcggagcgatggctttgagaagaatcgtaagatgggtcagagtcagggaaaacaatgagaccataactgggcccaaagactcactatctgtggggaccccagacaggcagacgtggcctagccagccctctttcccagtactagggccccacgtgctgacatctgtgaatgggcttcagggtgtctctccctcccttgcaatcatatgcaaaactatgtgtcaaaataatgtgtgcatctttctggggagggaggctatagctttcatcacattctaaaaggtttcagtcccataggaaaaggtaaggagcagtgcattggtggctggagtcgaaagtcctcccactctcaaggcctggcatgagggttccccagtactaggatatctttctttgctgtatcttccacacccattagatcatctttctcagcgacttcctcatactaaggaaagagaaaagagaactgataaccgtctcttcccacaacacaataaaatattccttgcccagggatgtcccctcctcccagtccatgtgcccaggaatacctctccctcctgaccttacctgcaccttcatgagccgccccaggtaagagcggtagtaagacaggtaaatcttgctcagcgtctccacatattcatccctgatctcctttgctgttgctcgttcattgcccagcagaaactgatagaagaacctagggggtcaggaacatgtcagtctacctgtctcccaagaaaccagatgcccacactaggccgctcaaaaactcaaaggccatcccatgcacttccttggggttgtgacctgtacttcagcagggccgtctgggggatctgatagttggtcatgggtttcctgaaggaataaatcttctggaggataaactctcggatcttcgtcactgcctagatgtggggaaccaaacacagggcatgaagctgcaacccttttgctgtatgagaggaactgggggaagcaacaaatggtaaacataggcagaagggtggtgaatatctctttggtatttctcaagattttcagggaaacccagagagacaagaatggggctgcccagaaaaggcagggtgaagtccctggagacaggctacagtgagctctgccaaggaaatccatagtgaagatcttgggaaggctgcttccagtagcctccagggtatccatccctacttcccaccttgacccggagccgatcgagcacgcctctgacatctgcgcaggctgctgtgcctctagcttcctgctctctgactgcggctgccttggcatccagctcctgtagctgctccaagaacctgggctctgtcactggagcctccagaattgccctggttagcagggaggggtgggatgagttacaagggagacccagacatccctaaaccagacccagaccacactccttacctccagcccctgtcatctctaccaccttgcattgtaccatatagtcaggacacatgtacaaagttttctattcctggacctccccactatacacctgatcttacatcattcttaatcttaatctttgatgcctaatgcatacctaaagaaatggtggttaacctggctactaatttctaaaaagcacttaacctggagccaggagacccatatggtaaatagggtgggtcaccccagcccatccacctgctatggacattataacccttcaaactggtaactcacgtgaccagagcagaaggcaccaccagaccatcaacaagctccccaagtttcccccgaactgcctggcgatttcgaagtcgaatgttcatggctcctgactgttcctgcagtgtccggatctcagagctgatggagctgaggtcactctgaaaagctcccaacatctgctccattcgctgtagggagggtagatgttgccggagtgctatagggtttgtaggggataagtgggccaccaaagactctttgtgaagtcttcagtatttatcagtccttgagggtggcagatgatgagacaccccagattatcaggaaataacattaaatatggcagtaataacaaaaaaggctcctgaagtcatcttgaaaatgaccctaacctgtccccatcttgaggctgatgacctaaaaatggcaccagagtccatgatctggttcagagtagctattaggggtcacaggtcatgattactaacctccaggacagcatcacaggctgtgatctggttgtgtagagatgctatattctcactctcttgaatatctgatccacaaaaagtcaaggggcctcatggtgaagatgggagatcctcagatttgtagtacctctccaatttctctttgaagtgatagaaacctcagagatgttgaccccagctgggacatctgtaccacacgccacaaaatccccatgtcaatagcaccaccccttccctctgctggaggatacaatcccgaatggatttctgttcaatctgctgtagctccagctcaacttgctttgaatagtgacggagatctacaccctgggagaacataaagatgacaggtcagaaggaagtctcagtaaagggacactgtaacagaatcagtgaaggactaaagggtcagataccaggctgatacaacaaaagcaagagactgttgtttttccttttggggtagaatagatagaagggcagattagtacaggggaaagcctcaccgttttaagagcttcctttactaactcatcctccagatttgcctgaatgtgaactggaaatagaagtttatcataagggtccagctccacagctccctctccccacattgagtatctgcacaccaatccctaccttattccttccagcccccatgcctctcagattacaggtactgcacccaccccatgccatcgcttaccatccacttcatccaggatgaattcatcagaagtgatatccaactccccaagttgcagtggttcctggagcccaggaccacccgcctggaaagggataagttaatgggagtagggtacggtgaaagacagaaagaaaaaatataattggatatccccagtccttcaagtgagaaggagctgcttttactgggagccacaggtactgctttgaaaaattctaagagtctcacgttgtacccactctcctattttgtgctgatgggtaaggaatacgacaaggagtgagacgatccagtgagacagtggaggtagcccagcatggtggtgggctccttgtagtcccaactacttagaagctgagacgggaagattgtttgaggagatcaggagttcaaggtcaacctgggtaacacagggaaacccgtctaaagaaaacaaaaaaaggtaaaagacaagacagtgcagtggaggccggacgcagtggctcacgcctgtaatcccagcactttgggaggccgaggtgggaagatcacgaggtcaggagatcgagaccatcctggctaacacagtgaaaccccgtctctactaaaaaatacaaaaaattagccgggcgcggtggcgggcgcctgtagtcccagctacttgggaggttgaggcaggagaatggcgtgaacccggaaggtggagcttgcagtgagccaagatcgcgccactgcactccagcctgggcgacagagcaagactccgtctcaaaaaaaaaaaaaaaaaaaaaaaagtgcagtggagatgaccgaatgaggaaagctaggaattgcagaggatagagcagaacttgcacttaaatttaagaccctcagactcctgccatcttgggtgttctatcacacctctggggaaccccaggctttctagaaatgtcaaaacacatagtgtttacctgcatgccaggtgcaatcttacacatattcatctaatcctaacgacgatgtatacaataggttctatcttcctcaccttaaaggtgtgagaaatgatggcacagagaagctggttaacttgcccaagggcacacagcgtgtaagtggcagagatagaactcaggcagtctggcttcagaggccatgttcttaacctttacactatactacttcgtgactctaccccaaaatgtggagtgaagttgaaattttgtgccccagaacatgagtttcagccactagggtcccgctcagggtcgggtctgatcacagggaagggtacggggagccaaacaggtaatatcacgggtagcagccaagttcccacccttgtgcctaaacccagctcaggtctttctgaagctaggagcaccggaactacggaggagaaacagctccgcgctctcaccagcgggccctcttcctcctccatatctgaggtcccagcccgcaacaccagttcccgggccgcagccgccatggtcgcagcggcggccattccccgcagcctcacttccggcaactgtcagtcccggcgagtccgttccccggagtggagctacaagtcccaaagggtcttcctcagcgcgaaatcgttcccagatatttgagttaagttgtttgactccagctgtcccctttcagctctaaccacttcacccaactgcaaatggaaatatggaagtctgaaacacaaactagccccggaaccttcgctgttctcttacctatgaaccttacgaactgtaaagaaaggcgcaccggaagttgtggtacccaagccatactctcataaatccagccaggtcgcgctgaaacagtttccggaagcacttctcctagatcgcaccgcctcttcctcctggaagctatataatgatatcgcgtcacttccgctctctcttccacaggaggcctacacgccgccgcttgtgctgcagccatggtaagactggaatccgtgccgtgatccagcggcatcgcagctcgggcaaggaaagccggctgtcagggttctggaaacgtcctgccctgagggcctgcgactttctgtatggagccttggatcgcgtccctggaaagggacaccaaagatttccaattccggagagcgggcccgaggaagggtcactgctcgggcgcacgaaagctgtctaaggcttgggcgtatatggggaactctggcttttgccacgcacttttgggaatgggcaggagacctgcttcctctctccagaggttgcattttcccaagcttgaacgcttcatgtgcctactctgcaggactgaggagtttgctctgtggtgtgaaaacctaaggaatggggggcgggtgtcttgccacttgtgtgacaggcttaacctttttgtatgaagttcgtttgccttatcggccttactgtttgatagtttactgtgtctgatttcttcccccgtactttttcaactagtctctagtgatccctgaaaagttccagcatattttgcgagtactcaacaccaacatcgatgggcggcggaaaatagcctttgccatcactgccattaaggtaagtgaagtagggtaaggaatagggaatgtaaatgagaattgggttgtgaagacataagcaaaaatgaagcaaggctggggagacttgagtctcatccagatcaccttgactgctggattaagaaaagaaagtggtttagggagagactgacccctttagcatttaccacagaaaataagtgattaaagccaagatagtggtctaaggtcaagccaaaacatttcacctggggaagtggggaggaggtatggttgctcacccgaattcgctaagattttcctgaaccacgagcttgtgagatttcttctagattcggtttctttacccatcccaccatcataacagcaacccttcctgcgaaatttatattccctgagaattggaggattattgggcatcttgagggataagtagaaataccaacagataaaaagtgtgaagaagcctgtagatggagggtggaagaagtctgagtgggacatttactcagatgagccataattgacactcctttcctgtcgaagtgtgaaggagtacatccatctttctttggcttttaagaatcgaatcaatgaatgcaagaatattatttcacttgagtatttctctccacaaacctaatgaattcttggctttctagatacataacgttctttttttttcccttaagtcagaatgtgtagttagttgtggaaatagcctaccagtatgtgtccatgcgtgcagggctaggcctgtcttcttggcttctgttgcatggtaggtacttaggcgacgttagggaatggatagtagtagggatactgttggctctgttgaggaatttgtagagggaaattccttctgttgggtgctctgtgaaactaataaggcagtgtgaaatactgtacttatttcagagaccggctgtgaggcttaagtagaggtgcagcattcataagtgtaatagagaataaccttcatggatgtatctaactaaaaattagaaatcttatttcatctatatctcttcccacacccattttgaagtaaatcttttcacttgtaaacatataattaaatttgaggcttagtgcagtggctcactcggaggctgaagtgggcggatcccctgaggtcaggagttcgagaccagcctggtcaacatggtgaaacctcgtcatttaattaataaatttgaaagaccctgctctcttctgaatcaacctaataatttgacccttggtcatgtttatttatttatcccgagacagagtctcaccccgtcacccaggccggagtgcaatggtgcaatcttatctcactgcaacctcagcctcccaagtagctgagattacaggcacacgcccagctaatttttgtatttttagaagagatggggtttcaccatgttggtcaaactggtcttaaacttctgacctcaggtgatccacccacctcagcctcccaaagtgctgggattataggcgtgagccactgcacccagccacatttattttttgagactgtcgcccaggctggagtggcggaatcactcttcactgcagcctcgacctccagggctcaagtcaatcctcctacctcaactttccaagtagttggggctacaggtgtgcaccaccacatctggctaatctggatcttgctgtgttgtccaggctggtcttgaactcctgggctcagtgatcctccagcctcagcctcctaaagtgctgggattacaggcatataggcatgagccacggtgaagccaacccttgatctctttcttgcagataggaactgccatttgttttagtttcctggagcctactgtaacaagttcatataaactaagcagaaaattactcttggcgctggaggcacttaagaatcctaccttgcctcttcctgtcttctggtggttgtcagtaatccttagtgttccttggcttgtagctgcattactccaatctgttgctgtcatctcatggtcctcttcgtgtctctctcatgatttgtcattggatctagagcccaccctaatcaaatataacgtcattttacctaattatttccgtaacgaccttatttccaaatagggccacattctgatgttctagttggacaaaatgaggggcagggctcagtattcagttcctccttcactctccaaatcactttggttcatgagttcagatggcatgggtgctagtgctggtgttgatgtgatgctaccaatgtaagcattagtttctttttataataacttgggcagtcagttctgggcactgacaaaattgagtttgtgatcttggaatactttgattatggggatacagtgatttgcctaaataattgtgacccttagagattctgaggaactgacagcccaataccttaatcaaagcctgtaactcataagaccctggtttactgcatcagcttggagtggcaggccccttgttctcctaaatgcaagaatcagaaggcacttagtgacaactacatatgctgagcaatgggggaaaaaaaagatactgcctgctttcaaagggttgtctgtaatactaaattctgtgttcatgattcagtcatacccctgaacaaagttacttttttctttttttgagacggggtctcactgtcgcccaggttagagtgtggttgcgtgatcttggcttgctgcaacctccacctcctaggttcaagctattctgctgcagcctcccaagtagctgggattacaggcacctgccaccatgctcagcaacttttcttgtatttttagtagagacagggtttcaccatgttggccaggctggttttgaactcctgccctcaatgtcatctgcccacttgggcctcccaaagtgctgggattacaggcgtgagccactgcgaccggcccaaagttaaccttctgtcgaacggtttatatctggaaaggtgggtgaggaaagggtgacctaggggattgcaaaatagattattgcagatcctacctttgtgagctttttgaatgaggctataaaggaatttaaaaatcagattcaacactaattccgaaacccctcacttcattcagggtgtgggccgaagatatgctcatgtggtgttgaggaaagcagacattgacctcaccaagagggcgggagaactcactgaggatgaggtgaggacaaggaagggggctgggggtggggtcagcctcagaaaggggtccatctagatctgaccttggtctgcctgccaggtggaacgtgtgatcaccattatgcagaatccacgccagtacaagatcccagactggttcttgaacagacagaaggatgtaaaggatggaaaatacagccaggtgtgtactgaaatgagggcaggattagaggaagggtggagggtcctaacagaattgggcataggaggtcaggggataaaacatcccttgccccctcctctgaatccaggtcctagccaatggtctggacaacaagctccgtgaagacctggagcgactgaagaagattcgggcccatagagggctgcgtcacttctgggggtgagtggggggtctcatctccctgcctacctcgactcagcattcctcctactcgctcttctttttccccaaccttttgtttctgctgtgcatgacctgtgactcttctctttttacctgcagccttcgtgtccgaggccagcacaccaagaccactggccgccgtggccgcaccgtgggtgtgtccaagaagaaataagtctgtaggccttgtctgttaataaatagtttatatacctatggcttcctgtcctttctgtccattctaatagggaatgttaaagtgctgggtcctttttccatttagagctgccctactcagttgcccacacagtgctattagttttagcagtggtgatgctgcagaccccccagtctccctatatgtagctagtgatgtccctctctgtaaagagaaatgtgagggtaaaacagttcagccttgaggggctgacccagaccagtttagagaccaacaccctggggttggtgtgcagcatcattgtggagtgggttagctgagcctagccagttgcagttaaggtgagtttgcaggtcttggtcactctgggtttttttgtttttgtttttgttttcttttaaggggtcatctagtcataagggaaaatccttcgggctgtgaccgaagcaacaaaggcaaaaacgcggacgttggttatgaagggtgtggtctccctggtggagtacgtcggtgggttgggatggggagcggctggacagaccggtctcactccgtttggtgccactccacccgcccgggtttccgcgccctgccgcgctgctccgacgccgcttccggcggggatgggagcgcgcaacgcggaagcgggcggcagaccggccgccggggcgaggcgggggaggggccgtgagtgccgcagtcggccagccatggagcggagcttgctggcggcgaggccgcggcgacaaggtagccacccccgcagcatgcctcgaccgcggtccgcagctgcaccgcctctccccgccccccagggtgcgctggtcccggtcgcgcgctcagacctccgcatcccgggcgtggtcggttaagtccccggccgtgacccaggcccggggagctagtctccgcccttcgctcttacggatcccctcggagtacgccgcaccatgcagctcaggctcttccggcgcctccttctcgccgctttgctgctggtgatcgtctggaccctcttcgggccttcggggttgggggaggagctgctgagcctctcactagcctccctgctcccagcccccgcctcaccggggccgcccctggccctgccccgcctcttgatccccaaccaggaagcttgcagtggtcccggggcccctcccttcctgctcatcctggtgtgcacggctccggagaacctgaaccagagaaacgccattcgggcttcgtggggcgggctgcgcgaggcccgggggctcagggtacagacgctattcttgctgggagagccgaacgcacagcaccccgtgtggggttcccaggggagtgacctggcctcggagtcagcagcccagggggatatcttgcaggccgccttccaggactcctaccgcaacctcaccctaaagaccctcagcgggctgaactgggctgagaaacactgccccatggcccgatacgtcctcaagacggacgatgatgtgtatgtcaacgtccctgaactggtatcagagctggtcttgcgagggggccgttgggggcaatgggagagaagcacggaaccccagagagaggctgagcaggaaggaggccaggttttgcacagcgaggaagtgcctcttctgtacttgggccgggtgcactggcgcgtgaacccctctcggacaccggggggcaggcaccgcgtatcagaggagcagtggcctcacacctggggcccctttccaccctatgcctcaggcacggggtatgtgctgtcagcgtctgctgtgcagctcattctcaaggtggccagccgggcaccccttctcccattagaggatgtctttgtgggggtaagtgcccgacgaggaggcctcgccccaacacagtgtgtcaagctggctggtgccacccactacccgctagaccggtgctgctatgggaaattcctgctgacgtcccacaggctggacccctggaagatgcaggaagcctggaagctggtgggtggctctgacggggaaaggactgcgcccttttgctcctggttccagggagtcctgggcatcctgcggtgtcgagcaatagcctggcttcagagctgagagtgcctggggccacaggaaaggcaggaacaggaccttctctctcccaggcccaacgcaggggccctcactggctgcagctgatctgtttccttataccagatcctcagtctcactaaagacagcgatatgggagacacccaggggcctggcccgccagcccaaaagatggtcatcgggaagagaaaaagaaaaaaatgctgcagttgttctctcaagctagggcagaagaggggtgtcaagctcctcaataaacttgtctccacttcttcgagtgcagtgtggtcttcaccaggacccccagaacaccacaaacctggagagcccagaggctgccagaccctgctgcatgggaaggacatctccagggacatgggagagaggacagcctctctgaggaggaaggcccctaaaaggcaaagctaaggccacagcagccacaaggtatggggtgggggtagaggcaggacactgacccctccgatcctagaatggcctcatgcttggcaagggggaggggaacaggtccacaagatgatccagacacattatccaaaaaatcgctttcctctttaataccaacccaccccaggagacagctgtccacccccagttggggaaggggccacactgcccccacctccttgttccagggaacactcatttccctacaggtgatcttggggagagactgttcccaggcaaccctggagtctggctcagcgcacaaatctgtccagggcagatggccgggcccccgtgggcttggccttcgcctccttatgatgctgctgctgaaggctctgccggaccttgtcctggggaccggagacggggaggacacaggcacagagtgagaagtggcaggctgacaagggcagaggcacaagcaggagggtgcagcctgtggaaggcccggcccatgccaatgctcatttaccctgtgttcctcatccatgaccttcctcttcctcttcaccaggcttgccgtggagctgcggcccttctgctttggctttggctggaagggagccttagcctgcgggtcatagccctgagggaggggacaggagtgatatctgttacagcctcggagtcagggaactggcagcacccacctgctggccgcacttctggggacaagccatggtggggagaggatgtgggggagaagacgggcctgggcattcaggggcctgctccataccagcctctctatctgctccttctttccctgctccagggagatgacatccacctcggccagggctcgtgggtccagacaaataagctctgcaggtacctgggggtgtcacagagggacaggactcagcaaggagccacaggagggtagcaccaaaaagagaagccagggaggctgctgaacccctctacccaagacccccagcatgagacatcaggagagctttctctacctccaaccccaaaccacaccttccccagcagcaggggcctcactctctgcagcaggggaacctcacctccaacaggggcaatctcaccctctccagcaggggggaacctgaccctctccaggagagggaatttcaccctctccagcagagggaaacctgaccctctccagcagggggaatctcaccctctccagcagagggaaacctgaccccgtccaggagaggggaatctcaccctctccaggaagaggaaaccttaccttctccagcaggggggaacctgaccttctccagcagtggggaacctgaccttctccagcaggggggaacctgaccttctccaggaaggaggaacctcaccctctccaggacgggggaacctgaccctctccagcaatgggggggatctcaccctctccagcaggggagcctcaccttctctagcagggccttcacctcccactcctggcgctgcttccggcttctgtatggattactctccaggccatcgaagttgggctcaccggcccctgaagggagggagggagaagcatggagccataaggaagaacctcagtccaacagctccagcccaactaagcccccagttcctggatgtctctggcccaaacttccacccagagttcattcacttcaagccccatcccctggcccactcaccagggaccagcatgctggtgatgcccccagtgtgccccacccccagcacatcttcaaaggggcagaactgaaggccatgcacagggcctgagagccggtgggtgaggtagggctgttcaagggagggtgggctggccttgccctgccctgcccagatgttgacaacgtcacccattcccgccaccagcagtcccctctgggagaaggccaggtgccctgctccatggggcagggtccgagtgctcagaggctggtacgtccctcgcaagtcaaagatcttcagctggtggtctaggccagaggtggccatgtacctggtgagagaagagggatcaattaatatgtcagtaaatgggtttaccaagcaagctgtggccaagtccaggcatcaagtctggctggggagaaaaagattaatagtaataaccactgccatcaccctgaacactccacaggcatcctctcagttaagctgcacacaactcatactatttttatttccctttaagaggtgaggaaactgaagctcagggaaaggaaagctaggtcagtgaatggtcaggcctgtctctttagcatctgcctctaacctgctaacaccacacagccctctcaagacacgggcgtcaaaaggaacgcccacacgacaggctgcacccaaatgtgatgtccccctgtacacacatgcagcacacagcccagcaaggggaaggagcatgtgcagtggtcagaaaggcttcatgggaaaggtgggatttgagccattctagataattctcaaaaaattacaggaagtagatacacagcaggttcaaatgcattaacaccagagtgttgagactgagagggaagcagaggtttgttaggattggtgggaaacatggtcaggaaaatcaggagcagacaatttgtgaggtttctttaaagtcagactgaggacccacagctcatgatcccaacattgctctctggcagtgacaaatcacaaagtgaaggctccaaggacttgagaagacctactcagggaagtggtgaagtaatgcactggaggcccttgccctgcccctctgtgtgctttccctggaaggaaggagggaaggttggtgaccaaatcctctccaggaatcatgtactgcataagttgtttactttcagaagttggagttccttttctttttttgagacagggtctctctgttgcccaagctggagtgcagtggcatgaccctggctcactgcagcctctgcctccctggttcaagtgattctcgtgcctcagcctcccaagtagctgggattacaggcatgcgccaccaccgctaatttttagtagagccagggtttcgccatgttgaccacgctggtcttgaactcctggcctcaaatgacctgcccaccttggcctcccagagtgctgggattacaggtgaggttggagtttctatgttcaagttgttccttagagagggaagctgaagggggaccagccaggtaggggatgtatgtttgccaagaggccaaggagtctcttttttgccttggctgtgaacccaggagaagggaactgaagagttcttatgagcagagacttgcacagtgatggagcccaagagaggaccagctggatacttccgacaagataatcagcgccctgactttaccaaagagaaaggccatcagtgcaaaccaggaattaccgagcgctcgtggaacacagggtcacatcctttggtgaactaacaactcaaggatgcatgctggctcttctcccctccacacacccatctatgggacccctgggtaaagaccagcccagtgccaaatgggagtctactgtactactagtaagcagcagttcggctttgagaagtcaacgcaatccaatcataatacaagctaccagaacacctcttaagaaagatggtcagcctcatcactggagcccccgtggcctgacaagctcctgaggaggaccagagaaaagcagggatgggctgaagatcacaaggaccagagctgtttagcctcaaggtgttgattaaacttcaggcctcagcgaactagtgattaagccctaagcacaggagtggctgacccaggtagcccacggagggcaagctacagctttggcccagtggcccagagagggcagaaacccttgggcaggccttctgactctcctagagccaggctggtataaatatggagtaaaaagggcagaaccaaatcactcattcacaaagatacaattacaaaggccagacacggtggctcacgcctataatcccagcactttgggaggacaggcgggtggatcacaaggtcaggagttcaagaccagcctggccaacatggtgaaattccatctgtactacaaatacaaaaattagccgggtgtggtggcacacacctgtagtcccagcttctcaggaggctgaggcaggagaatcgcttgaacccaggaggtggaggttgcagtgagccgagaccacaccattgcactccagcctgggtgacagagtgagactccgtctcaaaaaaaaaagatacaattatgcaaaaacagggagcgggtggtggggggggtggtcccagcatcctggagactttgaataagctggtggccaagctggatgtggtggctcacagtaattactctgtaatcccagtactttgggaggttgaggtaggaggaccgcttgagcccaggagttcaagacagagaccagcctgggctacatggtgaaaccccatctctacaaaaaatagaaaaattatccaggtgtggtggtgtgtacctgagtcaaattctgggtgacaggaaaattctgggagatgagagcaggtcaagagaaactttaggaggcggtgacctatccagtgatggacacattgagtctgggatgacagaggataactgtgtagaaactaatggcatcacctgagctaggcgtggtggctcatgcctgtaatcccagcactttgggaggccgaggtgggtggatcacctgaggtcaggagtttgagaccagccaagccaacatggcaaaaccccatctctactaaaaatacaaaaattagcgcatgcagtggcatgcacttgtactcccagctacttggaggctgaggcagaacaatcacttgagcctaggaggcggaggttgtaatgaaccgagatcgcgccactgcactccagcctgggtgatagatcaagactccgtctcgaaaaatagtaataaaataaataaatgcatcacctggccaatcattctcaaaaaccatagccatggccgggtgcagtggctcacgcctgtaatcccaacacttgcactttgggaggccgaagcaggtggatcacgatgtcaggagttcaagatcagcctggccaagatggtgaaaccccatctctactaaacattaaaaaattaactgggcgtggttcgtgggcgcctgtaatcccagctactcaggaggctgaggcaggagaatcgcttgaaccccggggggcagaggttgtggtgagctgagattgtgccactgcactccagcctgggtgacagatcaagactctgtctcaaaaaaaaaaaaaaaatagccacaagtttttatacctaaaggataacgggagcaccacaccagggcaggctcaacgattcatccttttgtctccagaacctcagcgcagagccctgcccacagcaggtgcccagtgaatacctgatgacaaaaggaatcagaggaaaatacaaatcagacagaaaagctgtggaaaatgcagatactccctcaggaacagcagaaatccaaagcagacaccacctccacccctcacatcagccagacctggagagaacgatcatcttgaatgacaatgatgaacacagcgctccctattttgctaagcgctgtgctaaactatatgccttaactcatcttaatgtctacaacagcttatatgagggctttaaaccaaggcttggtaaactactgcccatgggccaaacctggcccatcatctagttctgtatagcccacaagccaagaatggtttttacatttttaagtggttgaaaaaaaatcaaaagaatattttgagactgtgaaaaccgtatgaaattcaaattccaatatccaacaaataaagttttattggaacggggccacactatttacttaatactgtggctgcttttgctctacaacacacagccgagtggtcacgacagcgactacagcatcctgatttgcactgctgctttgtacactacaagtcacagtgacacagtcgtaagtgcttcacagcatttcaagcacctcacatatcacctatcattacctgtgtgaaaagatgttttcaaagatgaaatacttgcaatctctacagatcagcatgaacatgaatatctacagtcaaatttgaccatctggaacactaactttgtacatcaattaggcaaaatgttaacctcaaaaagagaaattcagttcttcccattagtagatctgtattacacaaatatatttgattattattattttttttttctgagaccgggtctcactctgttgcccatgctagagtgcagtggcatgatcacagctcactgcagccttaacctcctgggctgaggtgggaggatcacctcagcctcctgagtagctgggactacaggcatgcaccaccacacccggctaatttttctatcttctgtagagacagagttttgccatgtcatgggtgacatggcttgtttcgaacttctgggctcaagtgatctgcccacctcagcctaccaaactgttaagattacaggcatgagccactgtgtccagtctcatattatgttttgtttgtttgtttgtttttgagacggagttttgctcttgttgcccaggttggagtgcaatggcacagtcttggctcactgcaacccctgcctcccaggttcaagcaattctcctgcctcagcctcccaagttgccggaattacaggcccccgccacgacacccggctaattttgtgaatttttagtagagacagagtttcgccatgttggccaggctggtctcaaactcctgacctcaggcgatccacccgccttggcctccaaagtgctgggattacaggcgtgagccaccgcacctggccatattacgtttaattttataacctaaaaatgtgtgggccaggcgcagtggctcacgcctgtaatcccaacactttgggaggccgaggcgggcagatcatctgaggtcaggagttcaagaccagcctggccaacacagtaaaaccccgtctctacaaaaaaatacaaaattagctgggcatgatggcaggtgcctgtaatcccagctacttgggagactgaggcaggagaatcgcttgaatctgggaggcggaggttgcagtgagccgagatcacgccactgcactccaacctgggagacagagcaagactacgtctctctcaaaagatttaaaaaaaaaaaggtcaggcgcagtggctcacgcctataatcccagcactttgggaggctgaggcgggcagatccacttgaggtcaggaattcgagaccagcctgaacaacatgctgaaaccctgtctctactaaaaatacaaaaattagccaggtgttgtagcaggcgcctgtagtcccagatactcgagaggccaaggcaggagaatcacttgaacctgagaggtggaggttgcagtgagctgagattgcgccattgcactccagcctgggtgtcagagcgagactccatctcaaaaaaaaaagttgtgataatttgttttctcttggtatttaaatgcctacatggtaccctttgattttacctcttatcagcaaatcataaaatatttactatctgactctttacagaaaaagtttgtggacccttgaaatggacactcatatttccattttcggggtcaggaaactgtggcacacagaggttatgaaatatgcctatacttgcaaggcccatccgtggtaacactgcgatttaaacctgggcatcctggctttagactctgtgctcctaaagcacactgccttccacacctttctgcccacctatgactcctaacacctcaccccaccagtgacttacgtgcctgtagaatctactgccacagcccggaccccaccacgatgacagagaatctttgccagtggctccttcatagctggactccataaagacacagtacctggaagagaagaagaaccaaagttgctaatacacacctaagcctgaggttactaaacatgggaaagatgggaactcaagaccaagagataacaaaaaagggaaataaaagggtaactttaagggactcatgaagtacaaatatagaagaaaagcaagtcaggatggtcagagtcaaaactaagccaggtactgaccattgctgtgtccgagatggatgacggcattgtaagggttctgactcataacatcgagccgcccagctcgagcattcagagctgccacaatcttccccactgacacatccaggtaggttagaaaccctgtttctgactgagagagaaagacagagagaatgacccagtcctgattgccctctgtattccctctgctggggtcctaaaggagaggtggtcatcccaagggcttccaaccagttcctgagctccatggccactcacagctgtagccaggaggaagtggaagggcaggaactcaagccgtgttactcggtcacagcggcggatacagtggagctcaatgccctgattgtcatagatgtggagccagcggttctgagcaacagcaagcagtgcctcagaatggagaaacctgggggagaggaagagtggttcaattgggaaatgaggtcacaggctatcattcaatcaggaatggactatctcaccccaactgaccgctgacagtgaggccactgaccggatgtcccgcaccgcctccatgacgttgatctcgcacataagcttctttgttacccaatcaagggcagccacatgacctcggcgccctccaaaagccaggtgtctgttggaggtgaggggcaggcagggtgttaaggcaggggaccaccgactcagacaacttgaggtctgccccacgccagccccatctctccaggcgggcagacacatgttgctgtaggtgcttaccctcacacccaagcaaatcgaaggaccctcccctcatcagcaacccaaacatacactgggaatggctgaagtggttaaggaaacacatcttagttcaagagtcactagaattcaaccttaccttccagttcgagagtagtttagtctgtagggtccaaactgccgcagattcaagtcaaagtgctgggaaagagaagagtgaaaaaaaagagtgccctgcagtaacgccttcttctagcccccattcctctattgtcctgcaccaccaatcaatcccttggctcctttacctcctcaggctcaccttggctgcacttgcaatgtccacagcctccacaatgtcagcctggcatatctttgctgtgtcttccccatcctccccttccagaaacctgaaagcaagggttaggatggcagtaaagcttcccaatatgaagcaagtataccaacataaaaacgagaaaagacagtcccaaaaggcagggaatgggggtccagattagggctcactcacccaggttcttcagcaagcagcagctcagaacgagcagctttgatacttgtttcctcttcctcagcttcagccacctcaagtcggcttcgagttttggctttagaatgtggtagctgtaacattgttggtggggaggagtggcagaagaaccacaggataagtggggtcacaggagagctacctgtcccagcctccatccaactcacccagacactccctgcctccagcacttcccaactctccggctggacctcacctttcgggatttgtcaatgcgacagaacttctggaccacttccacagggacgggggcggggcctgggaatggatcttgggcctaggggaaaggaggacgcaattagcagacagccttggattgaccccaaccctctcactctcaaggaacgaggcggcctgcctcgccacccatcaggtcccacgctcaccccggacaagccgcgctgggactccgggttcttccattctcggggtttcttcgggacctgaggcttcttagagatccgagacttctttaagatgtaagcattttttggtctctgaggacggagctcccgattcttcttgttacgaggaggccctggagaggctccggctgtggtcggaacggtctcttcctcccagtatcgccgcggtttctacaggcacatcaggaactccgcactcacgccccgccccccgaccccacagctaaaaacttcgtttcccacccagggaggcctctacctttctcttggtctgaagtttgtctttcttgggcgggacatccttgcccggcttgggggctgtctccatctcgcccacccgaacggcgatccacgtgcaaaactcctctcagctgccacacagtcggcttgaaaactcccggaagccctctgtccttcatccaatcagcagcgtaccaggtatgaagctctctaggtgccatcttgagtgagggcacgctctccttagaggggcggaacagtttttggcaccttatcgcgagcggcagcttatgcaagagtgacttaaaaaagaaaggcaggtccggagccaggggctaagtagcggtgcggtttctttttctggattagtttccccatcttgcctaaaaatgtcctagtctagtctttttagcagaactccactccctaaacatgtcagaactacacttcccatcaagggtcagaaagaaacttccggcacagtcttttcccagcattccttgtttacttccgggtttattactactgaaggaagaacgtgagtaggttaggatttcggttgagaggcttggggtcttgcgtttcgcccaccatctcctggggacagggtggagtcgatatccgggacgggggggaggttgcggtgcccctcagggctacctctcaagagtgctatcatttccgcaggccagatcagaaaagggagctcaggtaccttccagagagtgagacccagcgcccttgtctcgcacccagtaggctttcatccccgccatggcggagctgatccagaagaagctacagggagaagtggagaaatatcaacagctacagaagggtaagggaacagggtcggtatggtctcgcccaatgcacttacaacccaaagccattaccgagataaggtttgttgccccatctgggccctcgcgtgcagagacttccccgcctcagtctcagtactcttccctgttcactcacccgctgcccccatccttttctgcttcctcagatccatatccacctgactaggattgtggggataggtggcacatttgatgtttctaaattgcctttcctctcatccccagacttaagtaaatccatgtcggggaggcagaaacttgaagcacaactaacagaaaataatatcgtgaaagaggtgagggactgggatttgtggggcgaggagggacctgtactagccatggttctgatcacatatgtcccatccctccatcaggaactggccctgctggatgggtccaacgtggtctttaaacttctgggtccggtgctagtcaaacaggagctgggggaggctcgggccacagtagggaagaggctggactatatcacagctgaaatgtgagtttttattccaccaccgtgtgctgcaccctgtgatgcaagtgaaccattggagtagaggtgttgaaccattgcagaacagctctccatagtggcccctagtcctccagttcctccaaccctttccttcccttttaaccccccttcttctccctcccctggatctcaagttttccacctatctctttcttgcgtttagcactctccatagtgagtcctactaatttctccctttctgcttgtctcccttgtctctccttagtaagcgatacgaatcccagcttcgggatcttgagcggcagtcagagcaacagagggagacccttgctcagctgcagcaggagttccagcgggcccaggcagcaaaggcaggggctcctggcaaggcctgaccccatggtggggggaggggaggggaggggagggaatgaggcagctctaggatctatactgtagctaataaaatgtaaaaacacctggctctgtttcctgaccaggcacttctgtcatatccccacagccccttccaccttaacacacaccacctgtattaccccctcaggttcaaactcttgcacttggaatctctttgtggcacagtgttctttcttgaaagtgaaatcctaaatgtcttcaaacctacttcttgcctgtatatacaacccttaactctccctcatcttggttggcatgattcttttggaagggcatttgcaacataccatattgctaggaatgtcggtttaattgaaaaagaatacacagttctctaacctgaggccccaggatgaaatgtggttaccctccttgccaacagccctggcatctctattagtacttttcagcctctgtcttcctagaatttgcttgaatgtagctttaaactgacttaaaatcccagcatgtaatgctttatggtattataagtcctcccaagtttatatgttgtccataaagttgttctgccatttccttgtcctaaaattgttttatacacatttgcagcaagggaccagtggtagagaggttactggagagaaactgttctgaggaaacttttttcaccaatacctcactttttgctctgttcatggggacagaaaacattgtgccccttcctgttccatggcatctaccttcagccaattccccacccccactcatagcagccagttcatatgtactgcaaggacaggggagtagaattcaggtagtgttttggtttattatcttagtgttgtcacagtgatagaaacccccagagtgggaagaagagctcctgcgaggacctacattttgccattcccctctgccctggggctcagagccttgaagcctttgcttggcccttgcatgttaggatatggccaagaatcagaaactgatgcgtttttccagcactacctgtgtgctgcactcatggaaggtgggaagctatacacaggtatccaacttggttataagacaccagttcccacagggctggatttctcagctgtctggtaaaccagtggcacttcactgccccagggtggctggctccctttctgaatttctgtctcaatgtgatataattgccaccattcaggatggctacccacatctggtatgaacaccatgacttctgtaagccaacggggcttcctcctcagaacagtgcccgtgcaatcttcctccctgtggccttgatcctgggaaaggagccccctcctccctcactcggaggagttcctgaggcagacgggccactggtgacgccaggtgtagcagtagaggaccttcgccgctgccgcaggaggaaatcgtgtgaagctccatccatggcgtagaatacattagccgaggctgggatagtcagctctgaaggttcaggggatggatgtaaagcacacacacagttgttccccccacagccgcccagatgtggaagtactccactctcctcccgagtctgcctttccctcatggcctctgacctcgctcccctggtagcagctgtaccagctcatactctgaagccactgcagagtcacgattgtttttcttaaggacacgactgatgacacttggagccttgtcctggcttgtcacctggcagaacaggagaccaaaagagcaatcaatcagccatgatttcccatccttctaccctcagccactgaacccaaccacaaaatgttacttgtgtccaaggctttaaaatgaacaggaaaacccaatatggtggcttcctataccccataagccagcccacatggtgcccagtgaaacagagctgcttccctgtggggaaactgctgttgattctgaaattttaacacggcgaccaaaagtttaaggtgtagcaactaatgcaaaatagccatcaaaataaaacaaatttcagcttctattgaagactagagtttagaagataaaattaaaaataaaacataactgccaaaaccaaaggtcaaaattaaaactacattcaattccatttggctgcccaaacctcagacaacatttatagtccaacaagacaccatccttcaccccaactccatcccaaggctccctcaccaaaatgctcttatagacactgccatcttcccccaactccatctggactcggatgatacggcaatcagaggcccctggcccagatccctctcccccatatccagtccccccggaggcctcttctgcacccccactcagcggggagccacaggaggctgagcggcggtgacctcgagaaggcctaggggaggaggctggtggggagaggtggctggggtcagctggactgtgcagggatggactgctttccaaggcagagtctagtgacgagacagatggccacttcatgtgctaggaacaaacaacatgggactggcatgaaggcagggaggtttaaggaagaaacatttacagagtgagggtcagcgtcaaggtcagagtcaggagcagagctcacctgggccagccgagtcagcagaggagcaggagttgtaggcgcctcatctcccccagtactgggccggtcacaggacacaagcggggtagggaccccaacagagcccaaaaccctgcagtggcaggagattgggaggatcagagaaaagtggaagtcccaagaaaccaccccccagccagtgaatctctcactctgtccactgcgagatgaccaatgttggccgaagcacccgtggggcaggagggtcactggaaccaggtggctccacctcacaggatacacgatggctgggttaggggggcaataggcagagctcaggacatgacaccaatcccccacacctggccagaaccctggagtcccaacctcacccgccagtcacctctgagcctctgtcagtggccggagcccctgtagccacctctggatatcatggtcaggttggaggttatagccacgacattcattctggagccgtcgcaactcagaaaggactgcaaactcctgggaaggagccctcaaactgcaggagccaaaactcagggacccctgacttttccccctccccttcctggaacatggatagggaagtccagcatccagcccagacactccgctcaccttcctccgcttgtcaaaattgatgtatccattctgcgaggaaaatggggatggggtgaaagttccaaccctaccttccggccacagagagagaatatcccctctcttaaacacacacagccacatccaactcacaaccacttccctccagcctctctgactcttcgatccctccctgccttcctcctcaatctatcatggcctaagcactccacttgaccctttaaattgaatttctcaggtagacaacgagtctgctttgcagatgagaggactggatagtatccaattcgacaggattccttatccagagaggataaggaacttgtccaaggtctcagtatttgtttatttaacaaactctagcaatagagcaggagcccatcacaaaacctagatgtgcttacgtttcaggcacgttctaagcacttgacaaatacaaattcatttaacccttataacagatcaatgtagatgctatttctagtttcccatttacagatcactgaggcgacttggcacagaaacagatctggctctgtcccacactcagctatttgtgccttacagccccttgcaaggggcgggggggtctgtccgaccctgcagcccacttgttacatcattgcaatgacacacacacacaccactgacctccaactcatccttggaggctgcatccagcatcacaaggtccttcaggaaggtgccaaggtatgggaccacaccctgaagtcaggggtcagggtcagaagtgcctgccattgacgtgagggccctccatccctccgcacttgccctcctcattgcctcagagaacagatttcattctcctcacccctctgtgcctcccttacccatccttcaggctgctcccccaaaacatactcctcaccccttcataatcaccacccccacgcccaccaccccgctagtcactcaccccaccccgggagccagacctcggggccttcttggagtgtggctccagaggagactgcagcttcacctcctggtggtgacaaaataaaagagacatgggggagcagtagggaacaaggagaggtgggaatgccacaaaccaggctctcacctgcacgagcagctcccgactctgggaataattatcctcctcggagaaaatctggcagaggctggaaaagactctgaggctgtccctggggaagggagaaaagtggccctgaggacaggcctggctctgtcaccccctcttccccgccttctgaggaacccccaccccagtccaatgcctcagcctccgcacctggttgcttccccccaggctgcccgaagcctgtggatggggctggactgcagggctgacaccacggcataaactgaagagaagtttcggagcagccggcactcctgtgggggtcaaagaagagagctaaggctatgggaggcctctccattccatggccacaaaccgtagggcaatcttctctctcacctctgccacgcggatccacttctccaggagccgggccctctgtgggggacggagtggccgtatggtcacctccccaggtccctctccagtggaagtagcccccaggacagaactaaccactgcccctgccaccttgttaaactgtgtgacagtagctcggacagatgggcagaggtgagaatgtcctggccggtctctgtgaccccacaggcctcccaggcactgagaggggatcaaattgagaaaaagttcctgcagggtagaggtcagaggttaaagttcatagtcaagtgaggtcagccttccaatatcagggatctgaggatctcaggtggccaaggaaccagaggggcacagggtttgaagggtaacgaccaaagggaaaaggggagaatcaaaatggtaggtggaggaggctaggagctggatcaggaaggggtggaagcaaggaaaggatctggagtcaaggagaggttagtaaggggtcagggggcataggggccagaggtcagggtctcaccgcatctagcagggtcagctgttcggccaagtggtcagcgaggaacaccaggacatccgtggggtcagcagggggatcgccggggagggccaggggcttaggaaggtcgggggcctgggggtccacccgggaccggagattgcggatgaggtcagcgctgccccccccaacacccttccctgctgcataccctgtctgaagtaagaagctctcaagccggtcaagctgacccttggcctcagagccaaaatcctcagggtgagaggccagccaggttgacagtacagagatggctaccctgggagaagggaatcagccaagggtgagaggtaaagctgcagcctgggcagaggggactgtgagattaagaaccaggggtcactcactctgttgtcctctctagttcgtcggtaggatgagattcaagggcttccagcctgagggggagaagaggatctatctgtccatttttcccaaaccctcagtggctttgactattttggtgggatgttgcggctttaggaaatccgggcagatactccactaccctgcgtcccttatgactctgacctgtcagccataagccctagcaaggcaggcgtggaggtgaaggcccggtgggtagccaggaaggctgacatgaagctcacatcagtccctgatgtccgggtatccagtaggtgtctgaccagggcctccagagtgccagctcggagccgtcgggaggaacgtgggggaggcatagggacctggagaacacagagagatgatcgctaaccctttctcccactctgcacctagatttctgaggacaatcccagacccaggagatgttccagactcatttttctgatattcagagagggcaagagtcttggcctatgtcacacagcagagtccaggactccagaactccaacctagcactctggccagaaagtcagccagaggaaggaaaactgggaatgaagagtcagaggtgagaagctaaagtcatgatctcaccaagggatcaagaggtcgatattggcggcttgtgacggtaaacacggcaccatcctcctcctcatcccagacggacacaggggcctggaggagcaaggaaggggaagtcagacagttccacaccaccccccattgccctcagccttcaccccaggccctgctcctccctctgtacccctcacctgtggtggcagggcatagtaccagcgagtgcgaggaagggttgggggagctggtgaccccaggtctcccccactggggcccagacagccccaccccagccgcctcagggccccggtggagtcgaaggggctgcagtggaggcgtggatggagtacaggaattctgatcctggagacccccaaagccccttctccccagagctgaacccacacacgacagagaagcagggtacaaagggcaggagagggaagcgagaggcagcaagccagaggcagcgactaggggtagctgaaacctcagtccaggcactgccgcatgccccgcccctcccggccaaggactataccagcccagagaattagtctttttcaggacccctttcaccctggtccctcgggtagcgcctccactatctcagccctaagggacccccgaaggtagcagctccaatcccagtacaggaaggaaaaggggaagtgggatgatagggggttgggggcggtagactcagagagtcacgtggccccagcccctcccccgaccgatcccgaaaaaccagccctgccagtcaacctgccctcacctaggatctggacctaggagtttagggcctcggggccccaaatccaaattctggcccctcctgaggcccgaaatcctgctcctggccaccaccattaatccctaatgaaaacagatgaccactctctacccaccctaggatctttcctccaggtcccagaaccgtggcttcccggcctctacccaggaccggggcggggcgggggggcggggggaagggggagagagggaaggaggggtcacgaaatctgagggttccctccccaatcccagagtcagaggagctggttactgtggaaacaaacccctccccgccaaacaaaaacaaggagggagacagggaccaagacacgactgctcagagaggtaggcacactcaggcaggcagaggtggagggccaaagacccgcagggacaggacagccagccagaagttccaggcaggaacagggcaggttcctgcgggcaggtcctgagtcacactgacagagaaccacggagacgccaggactccccgcagcagagaaacgggccgacacccagggaggcgcgagaataactgaggcaaggaggaggagatgtagggacccagagacaagagaaaagtggagacttcagaaatacatacgccccctacctcccaccacccgcgtctcacctcttcttcttcctcctcctcttcctcctgccccccgcccacgaccaggccacctgggcccccaccctcttcggggtcccggcttcggaagctgctcagtacgactcccccgggggggctcgtgtccaaaagcagccgcaggggccgcgggagcatggccgagtgaaggaatcagcggggtcgggccatgggggcgcctggggagagacggggtggggtgggggtggagagtcaggcaggcgcgggggaaccgggcagggaagggacgtgggtgggtgtcaagaagaccggaagggagttctgcaggaaggttgggggagggggcaacagaagggtggaataggggggcccttggtgctgttggggaaggaggaggtcacgagtacggggacgcgcagggtgctcaggctctgacctgctcgggaggggtgggggcagcgtgggtcctgagccgctgttgccgtcggtctccggccccggaccgagtcccctccccggcttttccgtacccccttgaacccccccgccgggctcctgggccctcccgccctttccgctcccccccgcgtccgcccgctccgagagcaggagccaaaaggggaaggaagtgaggacaggagccagggccgcggactaggggagcgctggacgctcagggaccaggacccaggcgcccgagtccccagctccactgtcctccgcctctacactcggggattctggagaccacgtcgacccgcaatgaactggaataaagattccagtctccagcccctgggggaaggcaggagcagaatttgacattcccttccccaacaataacacggctaaaactcccgcgggaagcgtttcaggcggagagagagccggtcactccatccccacgggattaccctccctaccacaacccacgaatgtagctgaccgaaatcccggccgggttttccgaagggccctcgattcccgccccctcggcagggggcggggcaggaagcagccacatccggttccagattcggctctcagaggcttccggcgccgagaccgagatccccgtcggctcggtgtatcctcgctggtggagtaccctctgcttgagcgcatctcatgcgccagtagtggcgcccgccccgaacggtgtcgacggggcgttctctgagcggttcagggtcactggaagggaccagaggtgattggaatattcattgagcttggaaaggggttggaatgagagaaccgtttggaagcactggaatacagctttattcctacacgattagacccgttaccccgtgggtctggccgaccgtcctgactcggagatccctgagctgcgccgccgcttccttcgtcaacatccagcagctacttgatgagcgccctccagtgggccttaggtccctatgccggcgcggggttacagcagtggacagacaggccagtccctgtcctcgaggagcccatgatccgcggggagacaggcatttaacgacgactcacacgatcacttaaatacaactgtggtgaaccgcacaagagggacgcgcggcggtctgcggggaatgacgaggccgacctcgtctgcgacccagggagggcaagggtggaccaggcaaagggaacagaggactgggacctggaggtgggcgggaggcgtttggttcattggaggaaaggaatagccctgtgtgtgatgagcattgagaggaggtctggcgagcaccatctagggctgaagaactaggcagtggctccagcgcggggcggtgggggggacaagtgagccagggcaagaagaatggatttggccctagagtacgggttctccaaatgtaacctcggccctacagatctctgagactatgtcagggggtttgtgagattttataacaaaattaagatgttagtacaatatcgtgtttcgccgccgggcgcggtggctcacgcctgtaatcccagcactttgggaggccgaggcgggcagatcacaaggtcaggagatcgagaccatcctggctaacacggtgaaaccccgtctctactaaaaacacaaaaagttagccgggcgtggtggcgggcccctgtagtcccagctactcgggaagctgaggcaggagaatggcgtgaacccgggaggcggagcgtgccgtgagccgagatcgtgccactgcactccagcctgggcaacagagcgagactctgtctcagaaaaaaagaaagattatttgcagccgggcgcggtggctcacgcgggtaatcccaatactttgggaggccgaggcgggcggatcaccaggttaggagatcgagaccatcctggctaacacggtgaaaccccgtctctactaaaaaatacaaaatattagccaggcatggtggaggacgcctgtagtccgagctacttgggaggctgaggcaggagaatggcgtgaacccgagaggcggagcttgcagtgagccgagatcgcgccactgcactccagcctgggcgacagagcgagactccgtctcaaaaaaaaaaaaaaaaaagttttttgccttcttcattctataagtgtacagtggagtttttcagaagctacatgatatgtattgacaccatggttcccacgatgaatagaatgtgtgcctatgtattctcgtgttttaaatttttctcacttttaagttctagtaccataaatattgatagctataacccacatacccaaaagctttttggggtccttgatgatttttaagaggtcctgagagaaaaaaattttgagaaccactgtcctagagctccaagaaggtgaatgccataagatgtgtgttttttaaaaaagcatttctcgggcctggtgtggtggctcacgcctgtaatcccagcactttgggaggctgaggtgggcagatcacctgaggtcaggaattcaagaccagcctggccaacatggtgaaaccccgtctctactaaaaatacaaaaattcactgggtgtggtggcatgtgcctgtaatcccagctactccggaggctgaagccacagaattgcttgaacccaggaggcggaggttgcagtaagccaagatcatgccactgcactgcagcctgggcggaagagtgagactccgtctcaaaaaaaaaaaaaaaagaaaaattatcccttatataagtgaaagaaaaaaaaaaaagcattccagccactcagtggagagagattggagggattaggagcagatgatagggtattattttagggagctactacagaagcttgggccagagatgatggtggcttccacaggatggcagtgagtgccctcactctgctttctggaagagaggaaggtggtgaggaattcaggatattaaaaggcagttgaggtgtacatggtcagtttagagacatataaactatcatgggcacagatgatgggagaaggatgaggctaatattttctgccctccagacactgctgagtgctgtatctcctgcatcttcttaaggagatacactgtcttccttaatcctcctaaaagtcctctcaggctccgctgtccaatatgacagccaccacccacattaggctattgagcatttgatatgtggctagtccgaattgagatgtgctgactatttaaaataaacacctgtgtttgaatacttaaggtgagaaaagggctgcaatttattttcttttctttctttttttttttttttttttgagacagggtctcactttgtcacccaggctggagtacagtgggacaaccttagctcattgcagcctcaccctcccagattcaagcgatccttctgccacagctccccaagtagctgggactatagctgtgtgccaccatgcccagctaatttgttttgttttgttttgttttgttttttgagacagagcctcactctgttgcccaggctggagtgcagtggtgcgatctcggctcactgcaacctccacctcccaggttcaagcaattctcctgcctcagcctcctgagtagctgagattacaggtgtgcaccaccatgcccggctaatttttctgtatttttagtagagacggggtttcaccatgttggccaggctggtcttgaactcctgacctcaggtgatccgccctcctcagcctcccaaagtgctaggattacaggcgtgaaccaacgcacctggccaagactgtaatttctttttcttttttttttgttgttgagacgaagttttccttttgtcacccaggctggagtgcaatggtgtgatctcagctcatgcaacctctgcctcccaggttcaagcgattctcctgccccagtctcccgagtagctgggattacaggtgccgtcacatctggctaattttttgtatttttagtagagatggggtttcatcatgttggctaagctggtcttgaactcctgacctcaggtgatcctcccgcctcggcctcccaaagtgcagggattacaggcatgagccatcgcacccggcctgtaatttcttatattgtttacatgttgcaataatattttggatgtacaggttgagcatcgccgatccaaaactctaaaatctgaaatgttccaaaacctgaaatttttttagtgccaacatgatgccacaagtggaaaatcccacagctgccctcatgtgatgggtcacatatattattaaaaatattgtggtcgggtgcagcggttcacacctgtaatcccaacgctttgggaggccaaggcagcgggcggatcacctgaggtcgggagttcgagaccagcctgaccaacatggtgaaaccccgtctctactaaaaatacaaaaattagccaggcgtggtggtgggtgcctgtaatcccaactactcgggaggctaaggcaggagaatcgcttgaacctgggaggtggaggttgcagtgagccgagatcgcaccattgcaccccagcctgggcgacagagactctgtctcaaaaaaaaagagaaggaaaaaaatcttcaggccatgtgtataaggtgtataggaaacataaatgatttctgtgtttagatttgggtctgatcccaaagatattaaatatatgcaaatattccaaagtctgaaaaaatccaacatccaaaaacacttctgacccaagcatttcagataagggaccagaattattagattaaataaggtatattattaagttaattttacctgtttctgcttatttttttaatgtgagtactagagtatttaaatttacatatgtggcttgcattatctttctattggacagcactgcctaagtaactttttaaaatccctacacccaaggaaacatatagattaagtagcatgctcaaagagtcctacagttaggatatagtgccaggttttaacccagatcagtgtgaattccaagcctaggttctgcctaccacaccagcagcctccctccatgggttttgagataggatgaggagataaagtgacaagggaaagatacagagaggtggagcactgtaccttctttgaatccttgcaggtggacaggtagacagctgtggggaaagattgagaagggatgggatgctggagtggtagaggtggagggcagagggatgggtgtcaggctcttgggagtaggtggggaaagtccaccaacctcaggtcatggtcagggtagggctgacacttaccagcccagcccagtgccttgaagagcccaagcagaagaaaggcagacaggaaaaggcctacgctgtcctcaagggagggccctgaaagacctggcaggcagaaggggtgagagtgagctcctgtcttcctgggtgctggctcagattccgcagagctcccagctcttacctgctacctccagggtgacctcagcgctgcgccccgaggcaggcaggctgggatggtgaattcgacaggcatagcgtgccccatgctgctcagtggtgactgggggcggctgcaagtgcccagagaggctgacagagccatcggaatggtggcgcagggccgagagccacctctgcccctcggccttctgagagcggccccctgggccaccccggagttcccactccacctccaggcccccagaagggtagaagtgggacacaaggcagagcaattccgggggtgcctcccctggggcggcccgtgcaagggttgctggcatcagggacactttggggggttctggggaaagaggacgaaatgagcatagggaaatcagtccatactgtcctccctaagagaccctcagtttgcctgctggcttcctcagaactaaagaaggttaggtttcttctcctgaaatagggaacccactgtctctccattggtgcgtcacagaaatacccatgtcaaagcccctcaaatttccaggaaacttctagcctcccattacccctctaactcccaggaacctctttctatctctacttacttgcccaggcaccctcttatccatcatccctccccctattacggtccccacaatccagtgcccaccctctacccctggagacctctgtcccccaactcactgtacacagcaagctccagggtgacctgtccttgcaggtatggcaggtgtatggtggccagataggtgccctcctgaaagggttgaactgtaggcagccagaaggtcccatttccggtccatgggccccatggctcatcatcatcccaagcagcaaatgccacggccccttcttgggctgctggcatctggccattcagcccaggagttgcagccaggagcagatgtcccttacccaggtgctggcgtcgccactctagcccaaagggagggggacccggagccagagatgaggcggcctcggaggtggggggcatgtaggcaaagctcaagtccagcagagcatcttgtcccagtctcactcgaggggcaggggtgtgggtgaggacagtcagtaccactgaggaagacagggagatgaggggttgggaggggcatgagggagagaaagaaggagaaaaaaatagagaaatgcagttattggggagggctaaactgcagtttacccacccctcagaggacaccttttctgatactcaccatttcctagccctccctgcaaactccttttgctctgcgactgggtggcacctagtgtggctgagggtgagcagagaggtctaggggtggtgagtaggggcaatgagggggtatggcctttgaagcctactctgaacacatagcacactctagctcgggggactgcagaatccgaggccacttctgacacaacctgaaccactctatctccaagcaccacccttgaggaaccaggcctttcttgattacaggcgaagacaatgattgagccatgactgtcagtcttgtggtgctgtacagaatatttactgactctagaaggttccagctctagcctagacctgagcacagacctctatgctctactgaagcagtacagtgcagtggctaagtgcctggagcctggctgaccgggttcaaatcccctctgcagcttatttatatggccttgggccacttcctttttccatggctcagcttcctaatctctaaaattaaaagttgatgataataatagtacctacttcatgaggttgttgtgatggttaaatcattaatacctcttgctactcaagtctattcagttcccaattttagataacagagacacctacccatgaagggtgcttacaacactgtctggaacacagtaagtctacacgtgtttgctatagttacacctaacttagcataccccaagtcaacagcatctctgcaacattccccaccctgctccaatgcccatcttccctgtctttgatgaatgatcaccaagcccgccagacactaaaagcaaacccttggagttactcagactcatttattcattcagcaactattgagcactgaagatgttcaaggtatcctggtagaagacagaatggtgaacaagacaagcagtccctgctctcaaattgcctatagtccaatgacagacaagcaaattgtcaaaaataatgtgctatgtgctatccccaccaggacctaacagatctcacatctgtttccaatttaggttctcatcaatgtacgtttagacaattacaacagccctcctgtctggtctccctattctcagtctctccttcaactccttcttcacactgtagccaaacaaagtgactacaagtctgatcccatcacctacctgtttaaaaatcccaaatatgggccagacgcagtggttcatgcctataatcccagcactttgggaggacgaggcgggtggatcacctgagttcgggagtttgaaaccagcctgaccaacatggtgaaaccccgtctctactaaaaatacaaaattagcctggtgtggtggcacatgcctgtaatcccagctactcgggagaccgaggcagtagaattgcttgaacccgggaagcagaggttgcggtgagccgagattgtgccattgcactccagcctgggcaataagagggaaaccccgtttcaaaaaaaaaaaaaaaaaaatcccaaatacggccaggcgtggtggctcacacctgtaatcccaacactttggtagcctgaggcgggtggattacctgaggtcaggagttcaagaccagcctggccaacatggcaaaaccctgtctctactaaaaatacaaaaattagccaggtgtgggggcaggcacctgtagtcctagctacttgggaggctgaggcagaagaatcacttgaacctgggaggtagaggttgccgtaagctgaaatcatgccactacactccagcctgggcaacagagtgagactccgtctcaaaactaaataaataaataaaataaaaatcccaaatacctaggaagtcagctgataaaggcataggctgaagctatatggcctgggttcaatttctagccctgcttcttttttttttttttttttttttttttgagatagagttttgctcgtcacctaggctagagtatagtggtgtgatcttggctcactgcaacctctgcctcccaggttcaagtgagtctcctgcctcagcctcctgagtagctgggattacaggcgtccacaaccgtgcccagctaatttttgtatttttggtagagatggggtttcaccatgttgcccaggctggtcttgaactcccgacctcaggtgatccgcctgctttggtctcccaaagtgctgggattacaggcatgagccaccacgcctggcctctagctctgcttcttacacactgtgtgtccttgggcaaattatttaactggtttgtgtcctatatttatccatatgcaatacagggataatattaaaacctacaacctatggttgttgagaggaataagtgagattatgcatataaagtgcttagaacagggcctggcatatagaaaatacttgataaatgttagctgttactattttcattaccttcatcactatcatggacttgctggttaacttggaaaaatcatttaacctgtattttcctcactagtccaaagatctgacctttgcctatcttttaaaagaatcaagtaaaataacaggctttttccgggcatggtggctaacacatgtaatcccagcactttgggaggctgaggcgagtggattacctgaggtcaggagttcgagagcagcctggccaacatggtgaaaccccatctctactaaaaatacaaaaaaaaaaaaaaaaaaaaattagcggggcgtggttgtgggtgcctgtgatcccatcaacttgggaggctgaggcaggagaattgcttgaacccaggaggcagaggttgcagtgagccaagatcaccccattgcactccagcatgggtgacaagagtgaaactccgtctcaaaaaataaatatgtacataataaaaacaggctttttagaataacacgccctccaaaagaacttctgatggttcgctctcacctacagaacaaagcccagctttcaaggtatttgaacattcagcccctaacccacccttccaggcttctcctgcaccctacaaaccagccacatagaacccctttcttgtgcctagtagaagtggtcatcattggtcatctctttgctttggtcatgaggtcccttcagtttacattgtctttcccattttctcccaaacatctatcaagcttgtccaacctccagcccagggaccacatgcagccaaggacggcttggaatacagcccgacacaaattcataaactttcttaaaacattatgagattttttcacattttttttttttagcttatcagccatcgttagtgttcgtatattttatgcatggcccaagacaattcttctcccagtgtggctcagggaagccaaaagattggagacccctgatctaaatactccatgtacatgaaggtcactttcactgctgtttcttcccagaaatgtctaggtccttcaggtagaagtaatctttttcttcttgtaattatttttatgttctttttaatcctagcttctgaggcctataaggttaaactgttctcatcttcatggaattgttcagtagagtaaaaacagtatgcaatttcacttagtttgtcaaaatccagaaacatacttttgaattgttaaaaaaaaaaaaaagatccacaggctgggcacagtggctcacgcctgtaatcccagcactttgggaggccgaggccggtggatcacctgaggttgggagtttgagaccagactggagaaaccccgtctctactaaaaatacagaattatccgggcatggtggcacacgcctgtaatcacagctgcttgggaagctgaggcaggagaatcacttgaacctgggaggcggaggttgtggtgagccgagatcatgccattgccctccagactgggcaacaagagcaaaacttgatctcaaaaaaaaaaatccatagaattaataaacaaaacctggctgggcagggtggctcagacttgtaatcccagtaccttgggaggctgaggtgggaggatcacttgaacccagcagtttgagaccagcctgggcaacatagcaagaccccatctctatttaaaagaaaaaatttaaaaaaataataaacaagacctaaaggttttacagtttaactcttttttttttttttttttttttggagacagggtctcactctgtcacccatcaaaggtgcaatcctcccaacacagcctcccgagtagctgggaccataggtacatgccacgacacccaaccttttttttttttttttttttttgagacagtttcacgcttgttgcccaggctggagtgcagtggcatgatcttggctcactgcaacctccgcctcccaggttcaagcaattctcttgcctcagccttccgagtagctgggattacaggcatgcaccaccatgcctggctaattttgtatttttagtacagacggggtttctccatgttggtcaggctggtcttgaactttcgacctcaggtgatctgcccacctcggcctcccaaagtgctgggattacaggcatgagccactgcgcccagcatttttttaatttttagtagagacaaggtctggttatgttgcccaggctggtcttgaactcctgagtgcaaatgatcctcccacctagacctcccaaagtgctggaagtacaggcgtgagtcacctcacctgactccataatattttaaaagaatggtgagaattaaacactatacacacaaagtatattaagaaagtataggcctggcgtggtggctcacgcctgtaatcccagcaatttgggaggctgaggtgggtggatcacctgaggtcaggagttcaagaccagcctggctaacatgaccaaaccctgtctccactaaaaatacaaaaattagctgggcctggtggtgggcgcctgtagtctcagctacttgggaggctgagacaggagaattacttgaactcaggaggcagaagttgaaatgagcagagatcacaccattgcactccagcctgggcaacagggtgagactctgtctcaaaaaaaaaaaaaaaaaaaaaaagtatatttggggccaggcagctcacacgtgtaatcccagcagtttcggaggccaaggtgggcagatcaattgagcccaggagtccaagaccagcctgggcaacctgacaaaaacccatctccacaaaaaaaatacaaaaattagctgggcatggtggcacatgcctgtggtctcagctactcaggagactgaggcacgaggatcacttgagccacggaggtggaggttgcagtgagctgagatcatgccactgctctccagcctgcactgcactccagcctgggcgacagagggagaccctgtctcaaataaataaataaataagcatatttgtcaataaacatttaaaaatatttgataagacaagtataaatgtatattagcaaaatcatgaatgatcttggaccctggagagatttcatttctaattttacatcagtacaacagctttcattttcttaaatccctgatcaagcagaaatgcttgaaaagaaagagcacagcaggccgggcgtggtggctcatgcctgtaatcccagcactttggaaggccaaggtgggtggatcaccttaggtcaggagttcaagaccatcctggccaacatggtgaaacctgtctccaataaaaatacaaaaattaggtgggcgtggtggcacaagcctgtaatcccagctactggggaggctaaggcacaagaattgcttgaacatgggagacggaggttgcagtgagccaagatcatgccactgcaactgcactctagcctgggcaataagagggagactccgtctcaaaaataaataaataaataaatagcaggcaggcgcagtggctcacgcttgtaatcccagcacttcgggaggcgaggtgggaggatcacctgaagttgggagttcgagaccagccttaccaacatggagaaacctcatctctactaaaaatacaaaattagctgggtgtggtggcaggcacctgtaatcccagctactcgggaggctgaggcaggagaattgcttgaaccagggaggcggaggttccggtgagcgtgagatcacgccattgcactccagcctgggcaacaagagcaaaactctgtctcaaaaataaataaataaataaaataaaaataaataaatagcacagcaccttgctttgaccccagttgtttgtgaaatacagacaatcttaccacccgggcacttccagggctccctgtctgcatgtccttcactttctactttacattaggattatccgtggcaaatacgcccagaacctcctggagagcagagtctacatcagatcatctttgtgacccttaagggcacccagggccaccccagagattctgatttaatcggccaagctaagcatgggattgaatcaggtttcagtatattttagaaacctccaacagtgtggactgagaactgctgagtcctaactcattcttggtgctaaaaagtatttattgaatcaatggataaattaacacagtgccatctcttgatagtcacaacaagaaaagcagctgggaaatagtatccacattttacagttggaaaaacaaactcagaaagcaaagaccattctcatcatcacctcggtggagccagtagccctaggaaatattccaccccaccagagagagctactgtctacacaagagcagtgttcctcagcttctgccagggtgggggcttgagactaagaatggaggtataggcagaggtgagggtttcagcgtgggtttcaagtctgtctccctggttctgtgggtaattctcaggagggtggagggaagggagggtgcagggattggttggggttgccctgtccatcgggctgtgtcgctgacataaaatccagatagaaaagctaagaactctaccggtattctaccccggaataccccgcctccgctgccaggagggagagctcccagatatccaggtcagactctcctcattcttgaattatctgcacagtccctcccacgtcccagcctagaaaagcttctgactcctgggcctcaaactgcaatgcacctttcagtgcaataggagctatccaatctccagccgcgtccatccgcccactcgagcccacctgtttgcggaccacagagcggcagcacatccctacacggggctgtcaggcaaggtcaacgcgctagagtgcaagagcctttgctttgcggattgccgcagcgccgggtgtgggcgcaggtggggatagagtgctgggttttgaaagagtgacccgcaaagctgagggtgcagagcaagacacagatctgggaagagcagagaaaaaacgctcctgcttctgaacccctcccacctcgcatcacctgacaagtctctcaaggtctggtgtcgggaaaccccacctcttcaaagccccgcccttcgaaacaccagaaagtaacccccctgcccggccctgctttccccctaccccctgccaagctgcagttttttttttgttttttttttttaactgggtgagggctagaaggagcggtagagattgattcattctagccaaaccacctctcttaacaaaaaaaggaaactgaaccccgattggcgaaatgtcttgctcaagtccataaagcgagaccaccggctgatctggacccttagaatctacccacccttctccacctcccctccccagctacctgttgccatggtgatgagaacaggctcctgctgaggctctggctgtggtcgcaagaggctggagaggctgaggactgggctggatatgctgaccatcagccaagccccatccagggcccgcgggcagttctgcgcgggggtcaggccgctggcccatttcgcagaggcggggagaggcacgaagcggctcatctcgcagtgtggtgcgggggcgccccggggataccgcctgaaggcagcctggagggcgcccgcggggtctgagtgtagagaaggaagttgcagctgtagagtcaccgccgggaaaggggctggaagggcagcgttcggggaacttcaaatgcacagactaccccgtagtgagactcactttacaaaggggaagctgaggcctgaggtcactgccggatctaaagaggagggggtttcggtggaggcgacagaggtaggggggcggcgagtccctagagactcaccgtgtacactgagatagagctcagggtcgaggtccggccggggcggcggttcccccggtccctggcgcaacagcagtgcaccgggtctcttggccaggccctttccgctcgcatcctccacgaaccaacactcgatcaccgcgggtcctgctgagacggcggtcgccaggcctggcgtatagggacgcgagtgaggagcggtttgtatgtctggtgacctgccccactcccaccctggcatcggctccagtggggccacctccctccgcttccctctagttcttgggcgatgagtcgcggggttcgctcacccaaagccacagcgaggagcagagacagggacttcatggcgctgcgacctcctcagccatgaagcctcctcttcctcctttcactttcactttcctccaaagggcggcatgaggggcggtggaaatccccgctctggttaggtgaaggtgcctgggggaccggtgtttccccactggccaggcagggacccgggtagatcctctccagttctcaccaggacaccccagccttaccgcgccctcctggactacccagcagccccgagttcgagccctccccaaccccaggccctcccccgccccccaactcctgtgtgtgctctccaacatccacttgcccgaaaaccattactccggcttccccctatctgtgccgcgtccccagcaaacacacgggttatcgggaagccaagtaaatgaccaataaatattttaatcactgttaaaaaaaataaaaaccttgtactcctacgacttactccctccttgtctccacccactcctccatgagaaccgagttgggaatttccacgggaagtcgggggtggcggggagagacagggtagaaataaagagcgcatccttgagagggggtaggttctaggacaagggtggggctcaaaggccttgtctccacgacaacacaaacacagacttcaggcacagactacaaccacctgacccctgaccctgtgactgcaggatgttcaacacgccccctctccctccctccatgtgcaatctactctgtggagcaggggcttcagtgtacccatcagagggaaaggaagggtttagttctggaaataccttgggggggaggggttgagtagtagaatgggcgggcgatggtgaaactgtggttccccttccagaatatatacaagtccacagagataaaggaagacagtaagtgtggtgggagatcacccgggggccacagcgcccttgcatcgtgctccttattccctttcccgaaagctaccccaccccagtagcctgccccttcagtttgctcctccacctccaccgaagcccatctccaccttgtggactctgggtggggaccagacacgtctgctggacgggggcgtggccgcactcgcttcgtcgccgctgcccccgcccactccgggagactctctcttggacggcaaggatggccccgtgggagtcccaggcccaggtacggccccgaccccgcccaggcggtgccggcgctcacagtgtcctcggtggcgcatgaagctgtctcgccacatgaacttcttggcgcagactccgcactcgtagggcttgagacctgtgtgcgtcttcatgtgctcagtcagatggtgcttcatcttgaactttttgttgcacacggggcagtcaaacggccgcagattgaggtgcatgttcacgtgccggtcccgcatgctcttgtgggagaaggccttcccacaatggcacagaaagatcttattcccgtccccactgccagtccctccagggaccccaccaacgctacccggcacacccaggctccccaccgacgtgccccccacggtcactgccccgtgttctgcttggttccctggtggttggccaggagcctgtgaggatgaggatgaagacgacgacgggaagaccaggatctggttgccctgcatgtccaagggaaggagcggtcgaggagggtgggagggggcataggaagagggagttggcccccctgagtcatcaagacctgccacaggacccccaccctcatatgggccaaagtcattggaggactcacagaagttgacctgctcctcccccttgtctgggggctcactcagggtacggacatcacttatgctgagggtagcctcaggccctccccccactggaaccctggagctaccccctagttcttcatcttcatcatcctcacaggtcaacaccagatcttcctcctcctcttcctcctccagatctgggtcttggggaaccaggggtgttggcgctgggcaattaccacctcgcttcacgtatacccagtgtttctgtggcatgatgctagggggtgtgtaggtgggtctccggagcccagccccaggaaccactgcccccctcccatccccaccatcatcgcacagctcatctgcctccagcagcagctttccagatgtggcccctccactgccaacgacaggggctgggaatacagggccacctcctcgacgctccccactgcccactgcagaagctgcaaatgcctcttgggaggaagatgagaaatcagtggactccctggggctgaagtagttgctgctgctgggagattgattctcactggcccggctggaggcatgggagcgcgcagagcccatggtagcaggggccacagtgcccccactcccggatggcaccccagcaccagggacagtgacagaggtggctgcagcagtagtgatggtggtggtagctgaggcccggccttctcggagtagttcagtgcacttgtccacaatgtgccacatttggagcacagaccccactgtaaggaagttgacaatgtcagcagcagccatgctgaggcggccagtgtaagcggaggctaggacagtctcaaaggcgcctgggtccatgacactgggcagcgagatggaggtcatgcctttgagtaggacctgatcatggaagtaaggggaggaggcagccaggacagcccgatgagcccggaactcccggccctgcactctgatagatacatcgcagagctggccctgcagacgctgctgattgagggactccaagagggcactggtcacctcagggaaggacacatgtaccactgcagctgctggcaggggtagtgggggcggagccagcgacagcggcaggggaagtgctgccccactgggagacagaggagatggctccatgttgtggagggaggggatacccccccagccacaggaacaaagaaaggaggagggcggccgggggggtctctgggaagaaaaagagaaaagaataatgataacatctcataacgacacagcccgttacaactcaaaaatatgttcacgctcattatctgtgtaactccccacaacagtgaggtaggtattcctctcaaccccatttgacagatgaggaaactaaagctcagaaagattaagagattatccaaggtcacacagcaagtggcagcgccagcaaacacaggtatctgacaaatcttgtgccctttccttggaggttagagaaataaggtgctcttaggggctggagtggcttccttcggaattataccctatttccgacttacctgagagcctgacattccaaaatctacctttttggtgttttgcacccactttttgggagggggcagggcagctctgctactgaaaaccaacgcttgctccatctcccctcaggctatgccccccaagctctctcgccgaccacgccccctttcgccccagcttctctagccccgcccctttccaggcccaccccccccgtgccccgcccactatcgggcctttcgaccccgccccttgtctacctccgcccacaacggaccccgcccccccccgctccgccccaagcgctacctcggcctcttctcccacccggaaggcgccccccaacctcgcgcgtccccgcttaccgggccgcgcgcccccgggccccccccgcccctcactcggcggccagagcagcaacctgggcccctcccgccgccatcttgcgccgactccctccgccctccgcctccgctccgcctcccgcccctccgcctttaaaggcacagccgggcaccccgcccgtgccgctgggcaatactcggccgactcggccactttgcctttaaagaaacatcgccacattccaccttaaaagatcaggtcccctcctccgctgggagctcaggacttggttcggccgaagcatttattcccctttaaagctataagcctgccttttcccattggcgatgggtccaggtatcgttccccaggctccgcctctgagctgtgaccattagctggttggtgggatctaatcgccctcttcctagctccttacagtcccactgaagccccgccccctttctccgggcctggattggctaaataaccttgagtcggcccctcattggctttctcactcctactgcacgaagtgaaaaagtaaagtgcgttaaggcggctgaagcacttaaaaaaaaaaaaaagtactgcctgaacaacgtggcgaaaccccgtctctacaaaaaatacaaacaacaaaaacaaaaattagccaggcatggtggcacgcgcctgtagtcccggctactcgggaggctgaggcattatcgcttgagactgggaggtccaggctgcagtgagctgtgatctcaccactgcaccctggcctgggcgacacagcgagacaaaaaaaaaaaaaaaaaaaaaaaggccaggctagaaaggacagagcgggactaccccggggatactgggctaaccctgagcaaggggacagctaatgccaatctgtaacagtagaaggacaagaaaaagacagtgatacagtaagaaaagaactttattgtttattaatgtttctgtgtaaaacttaagcttttttttttttttaaagaaacaccaccaaaaggggattagcttagtccatcccttcctcagtcatctgcttcccaccttcctccaaatgttatcccagaacattctggaggcagggagaaggggaggcagctaatcagagtctgagagcacgatgatctcttctggatcgcattgtgtggccacacttgtctgcagggaagtgagagacaaagagtcaaagagatctggagtacaggagaaaagaaacaggaggatttagaggataaaatgggtgggaaaaaggaagagacaggatgtggcacgtggaatattcagacagagcagctgaaacagccaatgaaagagaacaaattgtcagaggaaacacgccctccccttcttaccttgcaagtaccaggccgaggaggctgtgaatggggggtttgggacagccgggctggagaagggatgcagagggagctggtcaccaggccatggctgggagagtccaccctcgtggaggaatcagcaactggggccaaggaagccaagggggaaggtgggctgggcagggtacatatctttttcccattcttctcatgcactgacctttgcctttccacatagctagaaacagaaacataaatatgtggaggggtacgggaagactgaggctggaggggggcagtccagtctctcccagcagactcagttccccagtattgctctccgaaagtcccctgcaatccctccttggcttccctcttcctcctcctcttgttattacctgtttcctaatggccctgatcctgtttgcttcttctccttccgagattttttgcaggggggaccagaatctccccagttgtgaggagagacgcctccattgaaggaagtagaagagaccatgcctgctccattctctaagacagtggtgaagggctcctctgattgcttcctggaagaggaaatgtccgtctccacagaggaaggggtatccaggggcaaagcttcaatctctagctcaaagagctgagacacagggctttcttcctccagggtcagctcctcaggctgttctccattgctttcagcatctatgctggagggggccaggggttcttctgacagtaacgatggtgacactatgcgtcctttgttttgctgctcccctgaagatctgctgatctgtttgccaggttccaggttcttttcattggagatctgtagtgaggacatggggctcttgtctccatctttacctggaaaagaagaaaaggggagagggtagcctgagaatgagggggaaaaaatactgctgagaggacactaggaggaggaagggaaaggtttcaaacaggtggctcatgcctaacaaaacagaaatgacaggtgaggagaatgttcccttgacatacctgctgctgcttcttcctcttcgtcctcctcttcatcatcctcctgaccctcctgcatctgttccagatcctcctcctcttcagaatctgtggcctcctcctcttcttcttcctcctcctcctcctcttcctcatcactctcctcatcgtcttcgtcatctgtctcagctctggaggcagaagggcacccctgggatgccattccactagggccctgggagacaaagaagtttctctaaggaatcccttgccccagagggtttggttcttgctttccttctcatgctcccccatcagtcaacctggactccctggtggccagtgcaggggaaggacaatgtctctctgaaggctgtaccccatccacacctcaccagaatccaaggaggcttcgggggtgtctgcagagtgggaagaggtgccttggagccgagctcttctcttttttctctcgccctcctcacttttgtcttgcaacattgcatatttggagatgacctcatccagccgactcatggccaaactccggttttcccgaaggcgccgggccaacacaggatctgatagtgcagggtcaacgcctacgtgggaagacataaagtcagagcactcagcccttgaagggactagaagagtaaaaaccctagaaaggactagagagatgccccatccgcctcatacctgacatataagggtcactgagaggcatcccaccaaccccctacctggcctatagtcatctgtgaggtggcagccaaagttgtagatgagatcgaggtgacgtcgctcctgtaacctgatgcccacatctcggaaggcatcctgagccatgagctggagctgctgtcgggggaggccaaggctgtgtcgggcagctgccttctctacagcccgaagcacatccccatagtcagggaaggtatcaggccctggcttgttgatgagccgctcaatgcgcctgttaacctctgggtagcgggtgccacggtaggggatgcgctgctctatgacacggccggtcagtgaagagcagtctttcagctcacatagtcgcccaaagaggcggatcagcttacgcttcaaccgtgcctcctgcaggtatgcggagtctgggtcatccaattctgagagatccaactccttttcctgcagccgccggatctctgccacatagagcgccagcagctgctccaaacgctggatctgccgccgggaaccacgggtccttggagactgagaggcagtgttttcagcatttgtggggtccaaggagaggtgtgtgggagggttattcccagagggctcattggaggtggtggcggcaggggccaagttcagcttctttttggctgagtgggccttgagaacagtgcagagctcattgatgtagacatagagcttggctggccggctccgggcccgagacaggaccctagagaggatgttgcagaactccgccgaggccaaaaacagagagtgggcacgttgctgccggttatagaggaatgggaccacctcagggtggtctgctgtctgcatcttacaaagttcaaggaactagaaggttcaggggaagaaggaaggggaagagagacaagggagggggttgagagaaaggggaggtggggttagtgggaaagaaaggacaggagaaccagtcagccatccccctccctggggtacaacaatcttccccgctaaagctcacctcttcgaacagcttctcattctccagcttgtagcatttcttgccgcccgaactactgcttcctctggccccatgaggctcagaggagctaggggcttctgccccaggtgaggccgcattggggagtgggtgggagggccctggctgagcagctgcttcatcttcgtcatcatcatccagcacgatgatgctgttagcggtggccataggggatcaaatcccccggagggaggaagtggtggggatttcagaattcctgctggaaggggatggggcctcagaatgagcccctccagcatagccccatcccttcacctcacacattttctgaactccttgggtttcagtaacatccagccctgaccaacactgtcttcaccacctgatttcaataaccattagttctatatgctttttggggcccttcaagtggtgtggggggggggcaaaccacccccacaccttaagttgccaccttctgctccacccctcacgtcgatttccggtctttctgttgcatttcccccctatttcttagagttggcaagttgattcttcctcccacactgcaccccaaatcgtcctgacacccccttgcacagacaacacactcctgtgggcgccacctcatgtgtttgccccctctgctctcaaacaagtcaaccccacacccaccctatcctgaatgatcaccccaactcctagactctctgaggtgaaagaggttccctcccaacagtccgttctcttttctcctccttgaattatctccatatttcaccctccgatgagtctcctcaaactggggctttaggttgaagatattttacccaagtcccctccctttcaccccaccctaattttccccattctctcggtgacccgtaactgatcaaaagtccccccgcaccgcgctacgctctcgcgattcctcttagatcccaaccgtgggtccggccggtccgctagatgcgcttcccgccaaatccccctcccccagttcagcccccggccgctccactccctttcagggacaggaaggtaccacagctttcccctcagactcagcgcccagctctccccaatacctctccctctatatccccgcccccgcctctgatccccgcaccgtccggcccccacctcagaaaccgtctctcgaggcgaccctcgccgcaattctcagaacctcgcatggttccctccgccttccttcccactcccaccgcaggccccactacggaccggaagtcacagagtttccgccttcatgcaactaagcgccgccatattgtcgtacggaacacaggcttcctgtggccggaggtgacagtaggcccgccccgcgaacacctccagtgcggcccacatagtcagcggtctcttccaggtcggagtttgtctccccgaacccaggcgtcccaaagcagctgggggccgccattttgccgtacggcactggctacgcccggactccggtgcgcagccagtggagctcttttcacccggtgcttctacgactccgccaatcagaaacttcctgcctggggcccaaccgccggagagtagcgcgtagggaggaccgagcctcgtttccaaggaggggcaggggaaccgaacagggtggattaggaattgggctttccaaagctgtgcagagtttcagggaagggcagaagtctcttaaaagggaagtaaaaccttttctttcagttgggctattggcaagctatctggccctgctttcctgtcccccaggttcccatttccacggcttattcggctgacccagccccttcccctgcaagggcggcgcgctccttgccgctgtccagcagctgtttctactgccaggtgctgcgtcccgcgatcgttataacacatgcgtacaaatgagcacaacgcgccataaaagtgttattgttattactattgttgctgatttgcttttcaagcttcaccacagaactaatgaccagccagaccgttgggacctgaatggttcttctccagagggggtcctcgaagggccgtctgtgctgaccaggtggccgtgctttgtcgtgggaggcctagggtctgcggatgggcgatgatggggtggggcttggaggagagtttgtgcaaattgccgctgcgagggctgctgtgaggcgaaatgaggctcataaaatactttgggtctcctcctcctcctcttcggggagaggggaaaaaagaatgaaggatgaagaaacagatttgatacccacctcgttgtgtttagggaggctggagggactcgtggaggcaaggctgggtccagaggtgagcttatgaggaaaccagaaagattaacagggtcccaatcgctaagattcccatttccacaagtggtgggcatcttgccacttaactagggtcacagagcttattagatccctaacgctgagtcctagaatcgcaaacacccgtccgttgaacaatcccacatcacttctctccagtcgtcaaagtctacagctttcaaaatggggaacataaaaactctccgcgaggactgggacttggaagatgtaagggatttaatttcaagaacctcaactttcccaaaattggtcttcctaaggaaacacctgcagtacaggttctcattcttcacttctccttttacaatagagtcaccctcttaagaaaaaaaaaaaaaagaatagttctcttttttcccctcccccctcaaaagtatagttctcaaccatgaaatctcctgggggtaatcttacctgtttaaaataaagggaaatgtaccctgtttctttcaccaaggcaccatgaataccaccttttcttttttttttttttttttttcctttcttttgtcttttttttttttaaatgcagggtcggccgggcgcgatggttcacgcctgtaatcccagcactttgggggtccgaggtgggcgtatcatggggtcaagagatcgagaccatcctggccaacatggtgaaaccccgtctctactaaaaatacaaaaaaattagctgggcgtggtggcaggcgcctgtagctccagctactcaggaggctgaggcaggagaaccgctcgaatccgggaggcggaggttgcagtaagccgagatcgcgtcattgcactccagcctgggcgacagagcgagattatctcaaaaaaaaaaaaaaaaaaaaaaaaaaaaaggaaaaaaaaagggtcttgttctatcacccaggctggaatgcggtggtacggtcatagctcactgtaacctcaaattcctgggctcaagccatcctcccacctcaagtagctaggactacaggcgcacaccacctcacctggctaatttttttaaaaaaagttttttgtggaggctgggcgcggtggctcatgcctgtaatcccagaactttgggaggccgaggcgggcggatcacctgaggtcggaagtttgagaccagcctggccaacatggtgaaaccccgtctctactaaaaacacaaaaattatctgggcttggtggcacgcgcctgtagtcccagctactcgggaggctgaggcaggagaatcgcttgaacccgggaggcggaggtcgcagtgagctgagatcagccactgcactccagcctggcgacagagcaagactctgtctcaaaaaaaaaaaaaaaaaggttttttatagcgacagggtcttactgtgttgcccagatggatcttgagctccttgcctcaagcaatcttcccacctcagcgtctcaaagtgctgggattatgggcgtgaaccgccactcccagactactatcttattaaatatttctttttaacagttataaaaatgtttacgatcggccaggcacggtggctcacgcctgtaatcccagcactttgggaggccgaggcaggaggatcacgagggcaggaaatcgagaccaccctggctaacacggtgaaaccctgtctctactaaaaataccaaaaaaaaaaaaaaaaaaaaattagctgggcgtggtggtgggcgccttgtagacccagctactccggaggctgaggcaggagaatggcgtgaacccgggaggcggagcttgcagtgagccgagatcgcgccactgccctccagcctgggcgacagagcgagactccgtcttaaaaaaaaaaaaaaaagtgtacgatcacatgtttataagaacattctgttcttataataattgtaacagtaactcctccagaataatttttaacaactagagtcttacaatcacaagaaagatatttttcatctcaattaatatacatgtatatgcaggaagatgtaaaagattggtcaataaaggactttcaagtataaaagcataaagtttgtggggaagtggagtagtagtaggagctcaaggaaaaaagaggtgatgaaagaaaaaaggaatgattcccaactggtaagaactaatttatactttttttttttttttgagatggagtcttgctctgtcgcccaggctggagttcaatggcacaatctctgcttactgcaacctcccactcccgggtttaagcgattctcctgcctcaacctcctgagcagctgggattacaggcacacaacaccatgcccagctaattttttgtattttttgtattttttttttttagtggatatgggtttttggcatgttggccaggctggtctcaaactcctgacctcgtgatccacccaactcagcctcccaaagtgctgggattacaggcgtgaagcaccgtgcccggccatcactatgatatttcaattccactggacaataaatggtgatctaattgttttattttaaaatgtggggccaggcatggtgactcatgcctgtaatcctaccactttgggaggccgaggcgggcagatcacttgaggtcaggagttcgagaccagcctgaccaacatgaggaaacctcgtctctactagagatacaaaaaatagccaggcgtggtcgtgggcgcctgtaatcccagctatttgggagctgaggcaggggaatcccttgaatttgggaggcaaaagttgcagtgagccaagatcacgccactgcactccagcctgggcgatagagcaagactctgtctcaaaaaataaaaaaataggccgggcgtggtggctcaaacctgtaatcccagcactttgggaggccgaggcaggcagatcacctgaggtcaggagttcgagaccagcctgcccaacatgatgaaaccccgtctctactaaaattacaaaaaaattagctgggtgtagtggcgggcgcctgtagtcccagctatttgggaggctgaggcaggagaatcgcttgaacccgggaggcagaggttgccggaagccaagatcgcaccactacactccagcatgggcaacacagagagactgtgtctcaaaaaaataaataaataggccaggtgcagtggctcatgctgtaattccagcactttgggaggccgaggcaggcagatcacgaagtctaggagttcgagaccagcctggccaatatggtgacacccccgtctctactaaaaatacaaaaattagctgggcgtggtggctcgcgcctttagtcccagctacttgggaagctgaggcagaagaatcgcttgaacccaggaggcggagatttcagtgagccaagatggtgccactgcactccagcctgggtgacagagcaagactctgtctcaaaaaataaataaataaaataaaatgtggccagctgtggctcaccgcctataatcctagcactttgggaagttgaggtgggtggattgcttgatctcaggattacagaccagcctaggcaacatagtgagacctcatctcaataaatcaataaataggctgggcgcagtggctcatgcctgtaatcccagcactttgggaggctgaggtgggcggatcacttgaggtcaggagttccagaccagccttgccaacatgatgaaaccttgtctctactaaaaatacaaaaattagctgggcacggtggcacacacctgtagtcccagctatttgggggcctgaggcaggagaatcgctagaatctgggaagtggaggcaggctgcagtgagcagagatcactgccactgcactccagcctgggcaacaggagactctgtcacaaaaaaaaaaaaaaaaaaaagagttcaagaccagcgtggccaacatggtgaaatccccatctctactaaaaatataaaaattaggggtgctggtgcacacctgtggtcccagctactcaggaggctgtggcaggagaattgcttgaaccccagaggcagaggttgcagtgagccgagattgcaccactgcactgcagcctgggcgacagagcaagactccatctcaaaaaaaaaataaaaattaaaaaataaataaaatgtgaatattttcaatatgccagaattacatccttgaaacaatttttatttatttatttttatttttatttatttatttatttatttttggaaggagtctcgctctgtcacccaggccggagtgcaatggtgcgatctcggctcactgcaactgcctcccgggttcaagcaattctcctgcctcagcctctgagtagctgaggcagagaatcaggtgcccaccaactttcccggctaatttttgtatttttagtagacatggggtttcaccatatttgccagactggtcttgaactcctgactttaggtgatccccctgccttggcctcccaaatttctgggattacaggcatgagccactgtgcccggccacaattttaatttatgatgaaaatttttagatacctacttaaagatatatgaaggagtatatacttcttcaaaattatttccctgagtataggtgcagaatttaagactgctgccctggccgggcgcagtggctcacacctgtaatcccagcgctttgggaggccaaggcaggcagatacctgaggtcggagttggagacctgcctgactaacatggagaaaccttgtctctactaaaaatacaaaattagcagggggcggtggcgcatgcctgtaatcccagctactcaggaggctgaggcaggagaatcccttgaaccctggaggcagaggttgcagtgagccaagattgtgccattgcactccagcctaggtaacaagagcaaaactccatctcaaaaaaaaaaaaaaaaaaaaaaagactgctgccctaagctatccaagcatctcctccatagcccccaacactcccatttccctcctgtctcccctctcacctccttggtggggaaagaagatgtttataggaaaggtggtcacaattccagctcctcctccttctgaggtgtccccaggagccagtcccctaactttgcccatagtagtaaccacagcagcttataagcagcctccagcatcagcagtgtcaggaagagggccaggaagataaagaaagccttgtccaaggcacgtcgcacgggacccctgggaggggagggaccctgggcaaatgccaggaacacatccgcctcgtccacatcaccttcctctgccatcctgactcacagtcagacagctggctggatcagggggctgggatgcaaggccttgctcagcactgccaggattaaggagcatggctgtggcaagtcctgcacctgccagtcctgaccttaattcccacacctaagagaaaagagaaaggaccctatgagccttcagatcaattatttaaacatccagtgtgatgtgaaaggtctggactaaatgatccatgaactctattcagctttttcatagtataattctgtgatttggaaactgaaggcccaacatgaaggcataagctagaactgcctgtcactctgggtctcaagtctcaaagactcaaggctcaaaatcttgggccccaactgatagagagtgaggaaatggacctaccatgcatctgtgagccatggtcagtcaaggatctaaagccccttctggctggatggtagggggtgagatggtctatcctaaccaaggcgggtaggaacaagcagaggggacttgagttctcacaggagtagttctccccactgggtctgcaggcagctaagtttgagatggtataacccagaacactctcttcctaacttttggtctctgcagtaccaagggaggattatcattgactgcatgagcccaaggggaggcttataaaaagacaaagaccgtgatggatcagcagggcaagggtatgtgattgggacttggctgttgggttggggttattttactttactttacttatttatttacagacggagtctcgctctgtctcccaggctggagtgcagtggcacgatttcggctcactgcaacctctgtctcctgggttcaagaaattctccttcctcaacctcccaagtagctgggactacaggcatgtgccaccatgtccggctaatttttttgtatttttagtagagacggggtttcaccatgttggtcaagctggtctggaactcctgacctcaaatgatccacccaccttggcctcccaaagtgctgagattacaggtgtgagccactgcacccagccagggtaattttaaagaagagtgaagttttgccatcgatggtccaggtctcagaggctaccagtggaggatgtggttgaggaggttgtaggagcaaggactgaagaccttttcttttctttctttcttttttttttttttgactgattgaagaccttttcttaggccaggcgtggtggctcacgcctgtaattccagcactttgggagcccgaggcggatggatcaattgaggtcaggagatcaagaccagcctggccaacatggtgaaacactgtttctacctaaaatacaaaaattatccgggagtggtggcgcatgcctgtaatcccagctactcgggaagctgatgcaggagaatctcttgaaactgggaggcggaggttgccatgagctaagatcatgccactgcaactgcactccaacctgggtgacagagtgagactccgtctcaaaaaaataaaaataaaaaaagaagatgttttattgaccctgttccccaggcattggcctgaaggttgggtaatgaaattgaagcccatctggaaacaagggattcgcccaagtgaggctgagggaggggagggggaacggtggaggaagcagtgtgtgtagtagtgaaccttatactgggaacctttggagcctcctacctaaactatttcattttcattttcacctcaataggaagatcttgttccttttttttttttttttaaccggatcttttttttttttgagatggagtctcgccctgtcccccgggctggggtgcaatggcacgatctcggctcactgcaacctccgcctcccgggttcaaaccattctcctgcctcagcctcccaagtcgctggaattacaggtacgtgccaccacgcctggctaattttttgtacctttagtagagacggggtttcacagtgtaggccaggctggtctcgaactcctgacctcgtgatccacccacctcagcctcccaaagtgctgggattacaggcataagccaccgcacccgggctacaggatcttgctctgtcacccaggctggagtgtagtggctcaaacgtggcccactgcagccttgatctccccagctcaagcaatcctcccatcttagcctcctgagtagttgggaccacaggtgtgtgtcaccacgcctggctcatttttgaattttgtagagacagggtctttctatgttacccaggctggtttttaactcctgagcttattaaacaatccttccacctcagcctcccatcattctggaattacaagcataagccaccatgcctaagaataccttctttacttgggaagtcaggtcaccccccaaaagagcagaaatgatgttataatgttgttttgagggctgggcgcggtggctcacgcctgtaatcccagcactttgggaggccgaggtgggcggatcacaaggtcaggagattgaggccatcctggcaaacacggtgaaaccccgtctctactaaaaatacaaaaaattaggccaggcgcggtggctcacgcctgtaatcccagcactttgggaggccgaggcggacagatcacgaggtcaggagatcgagaccatcctggctaacacggtgaaaccccgtctctactaaaaatacaaaaaattagccaggtgtgatggcgggtgcctgtagtcccagccacttgggaggctgaggcaggagaatcacttgaacccgggaggcagagtttgcagtgagccaagatcatgccactgcactccagattgggcgatacagtgagactccgtctcaaaaaaaaaaaaaaaatacaaaaaattagccggctgtggtggcgggagcctgtagtcctaactactcgggaggctgaggcaggagaatggcatgaaccccagaggcggagcttgcagtgagccgagattgctccactgcactccagcctgggcgacagagcgagactctgtctcaaaaaaaaaatgttgtttcaagtcatgccgcattgtcttttgctgcagctgcaaaggagtctcgaaaaagtgaaaaaaccctggactagaatttaaactgatcacttagttgtgtgaagctgtggacaagtcacatgacctttctttagtgttttgttttgtaataaaatcagaaaaagctcttgcctcccagaattattctgagagataaatgaaataaaggttttttgatgttgttggttttttgtaaattataaagcactatgtaaatgtaacatattaatctgataccctcacttacatcccaggcaagtgtgcaataaggccacacaaacacctttattgtctctttacatggtaggttcagcaccaacatcttgtgtaataaataaacctagcatcttgttggaatttttttaattttgaaataattttcagcttacagaaaaatttaagaacagttccaagaactttggcatgtacctctttcactcagattttccatttgtcaacacttggctgtatttgttccatctcgctctcaaccccagtataaccatgtgttacaggttgaattgtgtctcctaaaaattcatatgttgtgcagccataaaaatgaataagggctgggctgggcgcagtgtctcatgcctgtaatcccagcactttgggagaccgaggcgggcagatcacaagttcaagagatcgagaccatcctggttaacacactgaaagcccatctctactaaaaatacaaaaaactagccgggtgtggtggtgggcgcctgtagtcctagctactcaggaggctgaggcaggggaatggcttgaacccgggaggcggaggttgtggagagctgagatcgcaccactgcactccagtctggcaacagagtgagttgttgccaaaaaaaaaaagaaaaaagaacaagatcaggccaggcgcggtggcttatgcctgtaatcccagaactttgagaggccaaggtgggcagatcacaaggtcaggagtttgagactagcctggccaacatggcaaaaacccatatctactaaaaatacaaaaattagctgggcatggtggcaggcccctataattccagctagtgacatgggaggctgaggcaggagaatcacttgaacccagggggccgaggttgcagtaagctgtgatctcaccattgcactccagccccactgacagtacgagactcctctcaaaaaaaaaaaaaaaaaaaaaaaggtgaagaattcatttgttcgcatgttctcacttacaagtgatgatgagaatacacggacacacggtgggaaacaacacaactgggtcctgtctgggggagtgggggaaggaagggcaccaggaagaatagctaatggatgctgggcttaatacctgggtgatgggatgatctgtgcagcaaatcaccattgcacacgtttacctatgtaacaaacctacacatcgcacacatgtacccctgaacttaaaataaaagtcgaaggaaaaaaataaaatttatataatgaagtcctaactcccagttcctcagaatgtaaccttatttggaaataaggttgttgcatatgtaattggttcaatgaggtcatactggagttgagtgggcctctcaccccctttataagaaaggaagtttggacataggcttgcggatagagagaatgacatgtgaccatgaaggcagagatcaggttgatatgtcaaagattgccagcaggccaggcaccatggcttatgcctgtaatcccagcactttgggaggccaacacaggtggatcacctgaggtcaggagttcgagaccagcctggccaacatagtgaaatcccatctctactaaaaatacaaaaaattggccgagcacaatggctcacgcctgtaatcccagcactttgggaggctgaggcgggcagatcacgaggtcaggagttcaagaccagcctggtcaacatggtgaaaccctgcctctactaaaaatacaaaaattggcagggcatggtcatgggcacctgtaattccagctattctggaggcaggagaattgcttgaacctggaggcggaggttgcagtgagctgagatcgtgtcactgcactccagcctgggcgacagagcgagactctgtttcagaaaaaaaaaaaaaaaaaaaatacaaaatgttagccgggcgtggtcgtgggtgcctgtaatcccagctactcaatcgggaggctgaggcaggaaaattgcttgaacctgggaggcagaggttgcactgagccgagatcttgccattgcactccagcctgggtgacagagcaagattccgtctcaaaacacacacacacacacacacacacacacacaaaagactgccagcaaaccaccggaaactagtagaaaggcctggaacagattctcccttacacccctcagaaagaaccaaccctgcctacaccttgatctcagacttccagcctccagaactgtaaggcaatacatttctgctgtttaagtctcccagtttgtgatactttgttatggcagccctagcaaactaaaacaccattctaatcaggaaatcaatatcactcttcaattcatagatcccattcagatttcaccagctgtcccagtaatgaccgcctcttcttttttaaattatcttttttttttttttttttttggagacaggtctgtcacccaggctggagtgcagtggtgcgatctcggtgcactacaacctccaccttccgggttcaaacaattctcctgcctcagcctcccaagtagctgggactataggcacacgccgccacagccagctaattttttgtattttagcagagacggggtttcgccatgttgttcaggctggtcttgaactcctgagctcaggcaatccacccgcctaggcctcccaaagtgcaattatcttttcttttaacagctgtttttttctttttctttttttttttttttgagatgaggtctcactctgttgcccaggccaaagtgcagtggtgctatcaagagctcactgcagcctcaaactcctgggctcaagtgatcctcccacctgagccttccaaagtgctgggactacagatgcgtgccaccatacttggcctatctgtcctttctagtccaggatcacatactgcatttgactgtcacatatctatctgtagtctccttcaatctgggaagttctcagtctttccttgtctctcatgaatttgacagttttgaagaggtctttcatttctttcttttttttcttttcttttctttttttttttaaacaggttcttgctctgtcgcccaggctagagtgcagtagcaggatcatagctcactgcagcctcaaattcctcggctcaagcaatcctcccacctcagcattctgagtagctgcggctacaggtgtgtgccagcacatccggggaatttaaacattatttgtaggctgggcacagtggctcatgcctgtaatcccagcactttgggatgccgaggcaggcagatcacaaggtcaggagtttgagaccagcctggccagcgtggtgaaaccccatctctactaaaactccaaaaaattagccaggcatggtggcacatgcctgtaatcccagctagctacacaggaggctgaggcaggagaattgcgtgaaaccgggaggcagaggtcacagtgagccgagattgtgccaatatgctccaccctgggagtcagagcaaaactccatcacaagaaaaaaaaaaaaaaaagacaggactttctacttgctagcctctctattgctggctttgatgatgtaagatgccatattggagaaacccacatggcaagaaactaggtgtggtctccaaacactaaccaacagggaactgagaccctcagtcaaaaaaccctttagaaactgaatcctgcaaacagctatgtgagtgagcttagaagcagaaccttccccagttaagctttatttttatttttatttttatttttattttttttgagacagagtcttgctccgtcacccaggctagagtgcaatgtgctatctcgcctcattgcaacctccacctcccaggttcaatcgattctcctgcctcagcctcccaagtagctgggattacaggtgcccgccacaacacccagctaatttctgtatttttagtagaaaccgggtttcaccaggtgggccaggctggtctggaactcctgacctcaggtgatgcacctgcctcagccttccaaagtgctgggattacatgcatgagccactgagcccggccctgagctttcagatgagatcacaggcaactcatagactgcagtcttatgagagcctccgaagcagaggatccagctaagctgttcccagatttctcccccacagaagccatcagataacagtgtgttgttttgagccaccgggttttggggtaatttgttacacagcaatagataactcatacactgtgctagaattgagcaccagatcttcagtaacagatacacccatatattccttccaaatttattcttttaacatttatgatatgtggggccttctgaaatgtggggctccaggcaggatctcctcttgcttggatataagagcagcactagaattagtctatcagtcttcacattttcttgcttgcatgctccttaaaaacattttggaaaattatgtgccattttgtatatatttttatttggcatctaatttttttccttgttgatttaaataactgcaaagagtataacaaatcggcttggtgcaatggctcacacctgtaatcccagtactttgggaggccgaggcaggtggataacgaggtcaggagttcaagaccagcctggctaacatagtgaaaccctgtctgtactaaaaatacaaaaattagctgggcatggtggcgtatgcctgtaatcccagctactcgggaggctgaagcacaagaattgcttgaacctgggaggcggtggttgcagtgagccgatatcataccactgcattccagcctgggcaacagagcgagactccatctcagaaaaaaaaaaagagtgtaacagatcttgtgtcttatataaatattgacattgtaaaataaaactgtcaactgggcacggtggctcacgcctgtaattctagcactttgggaggccgaggcaggcggatcacgaggtcaagggatcgagaccagcctggccaacatggtgaaaccccatctctactaaaaatacaaaaattagctgggcgtggtggcacgcgcctgtagtcccagctaatgaggaggctgaggcaggagaatagcttgaacccaggaggaggaggttgcagtgagctaagatcacaccactgcactccagcctggctgacagagccaaactccatctcaaaaaaacaaaaacaggctgggtgcggtggctcacgcttgtaatcacagcactatgggaggccgagacaggcggatcacgaggtcaggagatcgagacaatcctgactaacacggtgaaaccccgtctctactaaaaatacaaaaaaattagccgggcatagtggcgggcgcctgtagtcccagctactcgggaggctgaggcagaatggcgtgaacctgggaggcggagcttgcagtgagccaagatcgcgccactgcactccagcctgggcaacagagccaggctccatctcaaaaaaacaaacaaaacaaaaacaacaaaaaaaaacaaaaaactgtctggctgggtgcagtggctcacgcctgtaatcctagcactttgggaggctgaggtgagtggatcacctgaggtcaggagttcagaccaatctggccaacatagtgaaaccttgtctctaccaaaaatacaaaaattagccaggcatggtggcacatgcctgtaatcccagctactcccgggttcaagcaattcttgtgcctcagcctcccaagtagatgggattacaggtgtgcaccaccacacacctggctaatatttttgtatttttagtagagatggggtttcaccatgttggctaggctggtctggaactcctgacctcaggtaatctgctcgcctcagcctcccaaaatgctgggattacaggcatgagccaccacacctggccacaaaataaataaggaaataaataaatatatatatgtaaaatatatatatgtaatatatgtaaaatatatatgttatatatgtaaatatatatatatatacacacatatagtttgtttgtttttgagatggagttttgctcttgttgcccaggctggagtgcaatggcacgatcttggctcactgcaacctccgcctcccgggttcaagcgattctcctgcctcagcctcctgagtagctgggaatacaggcatgcaccaccacgcctggataattttttatttttagtagagattgggtttctccatattggtcaggctggtctcgaactcctgacctcaggtgatccacccacctcggcctcccaaagtgctgagattataggtgtgagccactgcacccagcccgctctgtcttaaatatgagtgcccagttaaggaacaccagatatttgaggaagacttcagacatgagcaaaaacccaaaattaaaagtaaaaacgacacagcattgtgctcttcgccttccctcatcgtctggcgcagggcagcccacttctggtgtttggcgctggaattaaacaaccaccatgtggagcaaaaaggcaagaccaagaccaccaaaaagctccctcagcgcacaacatccaacgtgtttgccatgtttgaccagtcacagattcaggagttcaaagaggccttcaacatgattgatcagaacagagatggtttcatcaacaaagaagatttgcatgatatgcttgtttccctagggaagaatcccaccgatgcataccttgatgccataatgaatgaggcaccagggcccatcgatttcaccatgttcctcaccatatttggtgagaagttaaatggcacagatcctgaagatgtcattggaaatgcttttgcttgctttgatgaagaagcaacaggcattattcaggaagattacctgagagagctgctgataaccatgtgggatcggtttacggatgaggaagtggatgagctgtacagagaagcgcctattaacaaaaaggggaatttcaattacatcgagttcacatgcatcctgaaacatggagcaaaagacaaagacgactgaaaagaactttagctaaaaccttccaactacattgtcttactctgttttatttctcagacacttcccccatcctcatagaacctgttgcatgcaacttagtttcacagctttgcctcttttttttttttatgtatttattccagacctttctgtcacacagcacttgtataatcagactgaaaatggggatgagggtgtaaattgtattgaaaaagagatcatggccgggcgcagtggctcacgcctgtaatcccagcaacttgggaggccgaggcgggtggataacctgaggtcaggcgttcaagaccacgctgaccaacatggtgaaaccccgtctctactaaaaatacaaaaagttagttgggcgtggtggcgggcacctgtaatcccagctactcaggaggctgaggcaggagaatcgcttgaacccaggaggcagaagttgcagtgaaccaagatcacaccgttgcaccccagcctgggcaacaagagcaaaattcagtcaaaaaaaaaaaaaagaaagaaagaaaagaaaagaaggccaggcacggtggctcacgcctgtaatcccagcactttgggaggctgaggcgggtggatcacgaggtcaggagatcgagaccatcctggctaacacggtgaaaccccgtctctactaaaaatacaaaaacattagtcaggcatggtggtgggctcctgttgtcccagctactcgggaggctgaggcaggagaatggcatgaagccaggaggcagagcttgcagtgagccgagattgagccactgcactccggcctgggcgacagagtgagactccgtctcaaaaaaaaaaaaaaagaaaagaagaaaaagaaaaagtgatagcaaataaaaatcaacaaatgtgaaaaaaaaaaagtaaaaacaaacatggaggaaagagacagaagaggaaaacttcatataaactataataaatttccacactgatgagagaaaatgagtatcagaagaagaagaagagttgtaagatcaacaggatatgagaaatgaaaacttgagccaggtgcagtggctcacacctgtaatcccagcactttgggaggctgaggcagccagatcacttgaggtcaggagttcaagaccagcctggccaacatggtgaaaccctgtctctactaaaaacacgaaaattagtcgggtgtggtcatgggtgcctgtaatcccagctatgcaggaggctgaggcaggagaatcgcttgagcctgggaggcggtggttgcagtgagccgagatcgcaccactgcactctagcctgggtgacagagtgagactccatctcaaaaaaaaaaaagaagaaaaaagaaaaaaaaacttgaacccaattataagatctagattttggccaggtgcggtagctcatgcctgtaatctcaacacttaagaggctgaggtaggaggattgcttgagcccagacatttgagaccaacctgggtaacatagggagacttgtctctacaaataatttaaaaattaacaggcagggcgcagtggctcatgcctgtaatcccagcactttgggaggccagggcaggcagatcatgtgaggtcaggagttcgagaccagcatgaccaaaatggtgaaaccccatctctactaaaaatacaaaaaaaaattagcggggcatggtggctcgcacctgtaatcccagctacttgggaggctgagacaggggaattatttgaacccagcaggtggaagttgcagtgagccaagatcgcaccattgcattccagcctgtgtgacagaaagactctgtctcaagaggaaaaaaaaaaacattagccagggccggtcgcggtggttcatgcctgtattcccagcactttgggatcccaaggtgggcagatcacttgaggttaggaattcgagaccagcctgaccaacatgatgaaaccccgtccctactaaaaatacaaaaaaattagctgggtgtggtggtgcatgcctgtaatcccagttactcgtgaggctaaggcaggagaattgcttgaacttcggagattttgcagtgagccaagattgggccacttgcactccagcctgggtgacaaagcaagacttcctctcaaaaaaaagaaatccatggccgggcgcagtggctcacgcctgtaatcccagcactttgggaggccgagatgggtggatcacgaggtcaggagatctagaccatcccggctaacatggtgaaaccccatttccactaaaaatacaaaaaattagccaggcatggtggcgggcacctctagtcccagctacttgggaggctgaggcaagagaatggtgtgaatccgggaggcggagcttgcagtgagccgagattgtgccactgcactccagcctggacaacagggagagactctgtcaaaaaaaaaaaaaaaaaaagaaatctcaaaaaagaaagaaaaatggccaggcacagtggctcatgcctgtaatcccagcagtttgggaggctgaggtgggcacatcaacttaggtcaggagttcgagactagcatgatcaacatggtgaactctgtctctactaaaaatacaaaattagcctgatgtagtggcacatgcctctagtcccagctactcaggaggctgagacaggagaatcacttgacaggaggcagaggttctggtgagctgagatcacaccattgcactccaacctgggcaacaagagtgaaaccccagtttaaaaaaaaaaggaaaaaaaaagaaaaaaaaaaaaccacggtagcgtgcacctgtgtttccagctattcaggaggctgaggcaggaggatcatctgacctggaggtcaaggctgcagtgagccatgatcacaccactgcactccagcttgggcaacatagtgagactctgtcacgaagcctgcagtgcagtgacgagatcttggctcactgcaatctctgcatctcaggttcaaatgattctctgcctcagcctcccaagtagctgggatttactggcatttgccaccatgcctggctagtttttgaatttttttagtagagacagtgttttgccatgttggccaggctggtctgtacctaattttgtatttatacttttggttttttttttttttttgagacggagtctcgttctgttgccctggctggagtgcagtggcgtgatctcagctcactgcaacctccgcctcctgggttcaagcgattctcctgcctcagcctcctgagtaactgggattataggcactcaccaccgtgcctggctaatttttatatttttttttagtaaagatggggtttggccatgttggccaagctggtctcaaactcctgacttcaggtgatctgcccacctcggcctcccaaagtgctgggatacttttggtattctttctcttaaaacaggtatccaaaattgtacacgtgtcagcctcccaccaacctacatctgctgcacttgcagagatagagtctatatatataagcatgtattaatatatataagtgtatatgtataaatgtatacatacatataaatacatgatcactactcttttccttgcttttcctcacttaataccttgaaatcaaacagagaggtgcttccttctttttttttttcggagtcggagtcttgttctgttgcccaggctggagtgcagtggcccaatctcggctcactgcaaccttcacctcacaggtttaagtttttcttctgcctcagcctcccaagtaacttggactacaggcgcacaccaccatgcctggctaatttttgtatttttagtagagatggggtttcaccatattggccaggctggtctcgaactcctgacctcatgatccttctgacttggcctcccaaagtgctgagattacaggcttgagccaccacgcccagcctctttttttttttttttttttaaatttaatttaatggagatgagttctctcaatatgttacccagagtagtctcaaattcttgggctcaagtgatccacctaccttggcctcccaaagtgctgggattataggagtgagccaccgcacccgaccccttgtttgttatagtgctcccttgactctcaaaaatgtccagtgtaggccaggcgtggtggttcacacctataatcccagcactttgggaggccaaggcaggtggatcacttgaggtcaggagtttaagacttgccgggctaacatggtaaaaccctgtctacaaaaaatacaaaaattagctgtgcgtggtggtgcgcacctgtaatcccagctactcaggaggctgactgaggcaggaagactgcttgaacctgggaggcagaggcggaggttgtagtgagctgagattgtgccaccgcactctagagcaagactccatctcaaaaaaaaaatgtctagtgtaaatgtatgttctttgaagtagaattgctaggtcaaagaatacgtaaatacttgatttgggtagatatttttaaaatgctttctgtagaagccgcaccagtgtaccttccttcctgtcggcaatgtgtgacagtaccagtttcctttccccaccccatcagctgagtgtgttatcaaacttttttttttttttttttttttgagacagagtctctctccatcgctcagcctggagtgcagtggcatgatctcggctcaatgcaacctccacctcctaggttcaagccattctcatgcctcagccaatagctgtgattacaggtgcatgccaccaccggctgatttctgtatttttagtagagacagggttttgccatgtttttttgtttgttttgagacaggatctttctctgttgcccaggctagagtgcagtggcatgaacatggatggttcactgcagcctcgacctcctgggttcaagtgatccttttgtctcagcctcccaagtagctgggattccaggtgggagccaccatgccctcctaaactctaccttttggtgagagtgactagccaccaaggcacactgtaaaggcctcagataacaggaagtggtagagaactgcggccaatctaacacctagacaaattcaaggtgggacctatcaggtactatgcttgttacttgggtgattaaattacctgtacaccaaagccccatgacacacactttacctatataaggaacctacacatgtacccctgaacctaaagtaaaagttaaaaaataaaataatataattcaaagtttgggctacagagtataagtgagagatattcagctactgggagtttataaaagacacacaaacatcgcacaagagcaaaagtcaatttgaacatccaccacagccagaggaaaccaaaaccacttccagtgtatggccgtcaggtaaagcattttgtccccctcacctcctctgcttctggctgtgagggagagggtggagagtcagacacaggaaggcaagaaagaaattcttgaggaagccagccactctgccagtttcacactggcagcttcccatgtcaaaccactcagtcggagctggccgagagaaaaaacgtaattcagaatgatgcttggaggattttttttttttgttccaaggattgagcaggtatgctctgtggcctgcctgagttatctttcatgggcaatggaagaactagccccacacaacatatttaaaggggtggggacacttgagtgtggggggtgcacagcaacatattcaagcttatgtacatggcatctgaggtcggggcatggaagaatactgaggcactgtgtgtatgttatttgtgcgtgagaatgaaattccttgaccctgaaaacaggacagggagtggagtgtgtggtgtgataaggaacgctgaaaacagcctcctgagaatgcggtttgagtgcttttacgaggccgcaggtgtctcacgacccgacctcaaaaagccatctagtggatgtttgtggtttaacaagcactttcaataaatacttggcagacggatgctggggcgggttctcttagaagaaatgccccccccattcccccggccccactcagctggaattgtctaagaactcattcttggcgttcactgcaagctataaactctgcaagtggtgcacccgacgtgatcgccttgaagttatgcgtgaaaggaggagagctcatcaattttcagaaaatcccggtaagggacagtcctgactaccatcaggtggacaggacccacgcgaaaaataccaggggttcggttatcatgggtcaggaaatgaacaaagaataattttttttttttttgagatggagtctcactctgtcgcccaggctggagtgcagtagcgtgatcccggctcactgcaacctccacctccctggttcaagctattctcctgcctcagcctcctgaatagctgggattacaggtgcacgtcaccccacaacaggacttaattaaccttgccttcaaggtgtacaataatagagaaaagttacaattacttgcctctgctgtgagacaaaacccagctgcacctccagcacacgagaacttcaaaatgcctaagccgcacatgcctaaaccgcagtggtcaagcattcctacaggaccttcttcatcaggatcttgcttcaagtgccagaaatctggccactgggccaagaaatgcccacagcccgggattcctcctaagccgtgtcccatctgtgcaggaccccactgaaaatcagactgtcccactcgcctcgcagtcactcccagagctctgggatctctggcccaagactctctgactgactccttcccagatcttctcagcttagcggctgaagactgatgctgtccgatcaccttcgaagcctcccgggccatcacggacactttgggtaactcttacagtggagggtaagtcacccttcttaatcaatatggaggctaccaactccacattaccttcttttcaaaggcctatttcctttgcctccataactgttgtgggtattcatggccaggcttctaaacctcttaaaactccccaactctggtgccaacttggacaatattcttttatgcactcctttttagttatccccacctgcccagctcccttattaggtcgagacattttaactaaattatctgcttccctgactaatcctaggctacagccacatttcgttgctgcccttttccccagttcaaagcctccttcacgtccttctcttttatctcctcaccttaatccacaggtatgggacacctctactccctccctggtgaactatccacgcccattactatcccattaaaacctaatcacccttaccccgctcaatgccagtatcccatcccacagcatgctttaaaaggattaaatcctgttatcactcacctgttacagcatggccttttaaagcctataaactctccttacaattcccccattttacctgtccaaaaaccagataagccttacaggttagttcaggatctgcgccatatcgaccaaattgttttgcctatccaccctgtggtgccaaacccatatactctcctatcctcaatacctccctccacaacccattattctgttctagataaacctagctgaccccatagatcctaaatcctttctcctctcccctttccattccttaaaacacagctcccacactagctctccatgactcatcccgacccttttcattacacacagccgaagtgcagggctgtacagtcagaattcttacacaaggaccaggaccgcaccctgtagcctttttgtccaaacaacttgacttactgttttaggctggccatcatgtctccgtgcagtgcctgccactgccctaatacttttacaggccctcaaaatcacaaactatgctcaactcactctctacggttctcataaatctattttcttcctcacatctaacacgtatactttctgctccccggctccttcagctgtactcattctttgttgagtctcccacagttaccattgttcctggccaggacttcaatccagcctcccacattattcctgataccacacctgacccccatgactgtatctctctgatccacctgacattcaccccatttccccgtatttccttctttcctgttcctcaccctgatcacacttggtttattgatggtagttctaccaggcctaattgccacacaccagcaaaggcaggctatgctatagtatcttccacatctatcattgaggctactgctctgcccctctccactacctctcggcaagctgaactcattgccttaactcgagccctcacttttgcaaagggactacatgtcaatatttatacaactctaaatatgccttccatatcctgcaccaccatattgttatatgggcaaaaagaggtttcctcactacgcaagggtcctctgtcattaatgcctctttaataaaaactcttctcaaggccgctttacttccaaaggaagctggagtcatttactccaagggccatcaaaaggcgtcagatcccatcgctcagggcaatgcttttgctgataaggtagctaaagaagcagctagcattccaaattctgtccctcacggccaatttttctcattctcatgggtcactcccacctactctcctgctgaaacttctacctatcagtctcttcccacacaaggcaaatggttcttggaccaaggaaaatatctcctaacagcctcacaggcccattctattctgctgtcatttcataacctcttccatgtaagttacaagctgctagcccacctcttagaacctctcatttcctttccatcgtggaaatctatcctcaaggaaatcacttcttagtgttccatctgctattctactactcctcagggagtgttcaggctccctcccctccctacacatcaagctcagggatttgcccctgcccaggactggcaaattgactttactcacatgccccaagtcaggaaactaaaatacctcttggtctgggtagacactttcactggatgggtagaggcctttccaacagggtctgagaaggccactgcggtcatttcttcccttctgtcagacataattcctcgctttggccttcccacctctatacagtccaataacagactggcctttattagtcaaatcacccaagcagtttctcaggctcttggtattcagtggaaccttcataccccttaccatcctcaatcttcagaaaaagtaaaacagactaatagtcttttaaagacacacctcaccaagctcagcctccaacttaaaaagactggacagtacttttaccacttgcccttctcagaattcgggcctgtcctcggaatgctgcaggatacagcccatttgagctcctgtatggatgctcctttttattaggccccagtcttattccagacaccagcccaactcggactgcaccccaaaaacttgtcatcccttctatcttctgtctagtcatactcctattcaccattctcaactactcataaatgccctgctcttgtttacactgccggtttacactgtttctccaagccgtcacagctggtatctcctggtgctatccccagaccgccactcttaactccctcttaaagtaaataaataatatttgctggcagggcacactccaatactttcaccctgatgaagtcctattctttacttttatactcactcctattcttgttcccatttttatgccaccctctacctctccccagctagctccaccacactatcaatctcattcactctctcctagccgtttctaatccctcatcgaaccattgctgaatttgcatttccctttcttcctgcgcctacacagctgtccccgccttacatacagactgggcaacctctcctatctccctacacctccaaacttcctttaacagccctcacctttaccttcctaaagaacttctttactttctagacaggtccagcaagacttccccagacatttcacttcagcaagctgccgccctcctccacacttacttaaaaaacctttctccttatatcaactctactccccccatatttggacccctcacaacacaaactactattcctgtggccgttcctttatgtatctctcggcaaagacccactggaattcccctaggtaatctttcaccttctcgatgttcctttactcttcatctccgaagcccaactacacacatcactgaaacaattggagcctcccagctctgtattacagataagccctctatcaatactggcaaacttaaacacattagcagttattattgcttaggaagacacttaccctgtatttcactccatccttggctaccttccccttgcttgtcagactctcctcccaggccctcttcttgtttgcttatactcagccccgtaaataacagtgaaaggttgctcgtagacactcaaagttttctcatacaccatgaaaatcaaacctccccctctacgtagttaccccatcagtccccattacaacctctgacggctgccgccctagctggatccctaggagtctgggtacaagacacctctttcagcactccttctcatctttttactttgcatttccggttttgctccgcacaaggtctcttcttcctctgtggatcctctacctacatgtgtctacctgctaattggacaggcacatgcacactagttttccttactcccaaaatcaatttgcaaatgggactgaacatcttcctgttcccctcatgacaccgacacaacaaaaaagagttattccgctaattcccttgcttgtcggtttaggactttctgcctccactattgctctcggtactggaatagtaggcatttcaacctctgtcacgaccttccatagcctctctaatgacttctctgctagcatcacacacatatcacaaactttatcagtccttcaggcccaagttgactctttagctgcagttgtcctccaaaaccaccgaggccttgacttactcactgctgaaaaaggaggactctgtatattttttaatgaagagtgttgtttttacctaaatcaatctggcctggtgtatgacaacataaaagaactcaaggatagaggccaaaaactcgccaaccaagcaagtaattactctgaacccccttgggcactctctaattggatgtcctgggtgctcccaattcttagtcctttaatacctgtttttctccttcccttattcggaccttgtatcttccgtttagtctctcaattcatccaaaactgtatccaggccatcgccaatcattgtatacgacaaatgctccttctgggattacaggcgtgagacaccgtgcccagccattttttttttcctaaagatgataaccattcttttccagctgtcttttcttttttttttttttttttgagacagagtctcactctgtcacccaggctggagtgcagtggcgcgatctcagctcattgcaacctccacctcctggggttcaagcaattctcccacctcagcctcctgagtagctaggattacaggcacccgccatcatgtccggctaatttttgtttttttttttttttggagagatggggtttcaccatgtcagctaggctggtcttgaactcctgaccttaggtgatccgcccgcctcagcctcccaaagtgctgggattataggcgtcagccaccacaccgggcaacaaatgctccttctaacaaccccacaatatcaccccttaccacaaaatcttccttcagcttaatatctcccactctaggctcccacaccgcccctaatcccgctcgaagaagccctgagaaacatcacccattatctctccataccacctccaaaaattttcgcagccccaacacttcaccactattttgtttattaatataaggagataggaatgtcaggcctctgagcccaagttaagccatcatatcccctgtgacctgcaggtatacatccagatggcctgaagcaattaaagatccacaaaagaagtgaaaatagcctcaactgatgacattccaccattgtgatttgttcctgtcccaccctaactgataaatatattctcccccacccttacgaaggtactttgtaatattctcccctgcccttaagaatgtagtttgtatgcctatcccaaacctataagaactaatgataatcccaccaccctttgctgactctcttttcggactcagcccgcctgcacccaggtgaaataaacagctttattgctcacacaaagcctgtttggtggtctcttcacacagacgccggtgacactattttcctaagccgtctggctagtagcccctaattgttcagctattcctctaacagcatctctagtgtagttaataaatcgctattggttgtaatagacgtagtttacccaatctacacttttattaattgttacccaccaaaatgttgacttaaatcctgcagcaatttgattttgggctttaaattgatctggtattccccatgggactcttaattgtgtctaaatagacgtgagagtcgaaagacccataaagggcttctcttgctttatgatacttatttttccttcctctcgttgatgaaataacagggtgaaagggatagccaattggaataaagcacaagtgccattccagttatttggcagtgtccagtaaagatccaccacaataccaccacacatccactcggggatgaacaagggctgactgattgataagctcttgaaaattcttaagctcactgcatccttcaggtctccaaggaatgctaagtttcctccctattgggagagacacgaagtgaacttagtgttgggagacagaagctggatggccctcgggggctgacgcgcagggtgccggacttcaggatatagcagagagagagcttggcgtgagttattactccaggctgtagaatcctggaaaagagctaccatgcagcccacacctggtcgactggaggaccaccttagtggaaaggggacaatctgggcctctggcctgccatgtgcacaagcataacaattgcttttgtttaatgtggacggaatatttgatccattccaaccaggcatttgcatcttggtatcctgtgttaattgccaaaatgttttttaagtctttaacttctatgatcctctagtaaaatgaatatatggttttaggaaattacaaaaactgattggggcagtccatacttgctctttagtgatccacagaacgttggaccgactacggcataaaagctctacattgggggtcaagaatcctggttgacattgggatctttatcgaaatccccccggattcagtggtcctaatttactaatgcccagtgtgaggagagtcaggagggacagaggtacttttcagaagtagagagctgtctttgacttggcaagttcctacgggatataacaaggcaagcactaaatgcaatagtttgaggcgaaattgacttggttatgttaataactagatggtcagcaatagagcgaggaaaggagaaagagtaatagaatagatgaaagagttaaatttttcttagctttaatttggtagggtttccccctgggactatggcccacaactctggagggggtggtgctttcttgactcgggtgtgatgaatccatccctttttcgctgtacaaactgcagtctcggtggttggcagcacaaggtagggtccttcccaggctggctcgagttttccttctttccaccctctgatgacaacatgatcttcaggctggtgctggtttaccagaaattttaggggtggtacctgtgctaaaatatttttagttttgagggagaggaaagtggaagataaaccaagcatataatttctaagaaatcgaccttttgttttaaatgtggggacatcagcagtggactttatagtccttggtgccttcttactgagaaatttcctttagcacttatttttattagtttttttagaccaaagaacgccaaacaccattttatatttgacagtgcttcctgtatgatttttataccagataagctaaatttcacctttatattagtgtgttattaatttttttttttgaaacggagtctcactctgttgcccaggctggagtgcagtggcgcgatcttggctcactgcaacctctgcctcccgggttcaagcagttctcctgcctcagcctcccaagtagctgggactacaggcacacgctgccacgcccggctaatttttttgtattttagtagagacggggtttcaccttgttgcccaggctggtcgcgaactcctgagctcaggcaatctgcccgccttggcctcccaaagtgctgggattacaagcgtgagccaccgcgcccggcctattaatgttaaacttagttttaataacactttgtagacatatttatccaatttttaatgtctgatcataaggtaagtttttgttttttgtttttttttttttttttgagatggagtcttgctctgtcgcccaggctgaaatgcagtggcacgatctcggctcactgcaagctccacctctcgggttcacgccattctcctgcctcagcctcccaagtagctgggactacaggcgcccaccaccacgcctggctaattttttgtatttttagtagagacagggttttacttgttagccagggtggtctctatctcctgacctcatgatccacccacctcggcctcccatagtgctgggattataggcgtgagccaccgtgcccggcccataaggtaagatttttatagactgtttttttttttctttttgagaaggagtttcactcttgttgcccaggctggagtgcaatggtgcaatcttggctcactgcaatctctgcctcccgggttcaaggaattctcctgtctcagcctcccaagtagctgggattacaggcatgcaccaccacacccagctaattttggatttttagcagagatgggggtttctccatgttggtcaggctggtctcgaactcccgacctcaggtgatctgcctgcctcggcctcccaaagtgctgggattacaggcatgagccactgagcctggcctgtttttaactttttataatttttgttaaacagcgggttagtgctttaagaaaaacccgttgtgtttttattttaatgctcagttcacagaaaaactgggtgatacccttttaaccttagccaatatgtttacacacataatttccattacaattaacattttaaaacttgcttaaaccttcaaaacaaattttttttttcttttttgagatggagtcccactctgtcacccaggctggagtgcaatggtgcgatcttggctcactgcaacctccgcctcccacgttcaagtgattctcctgcctcagcctcctgagtgagtagctgggattacaggtgcccaccacaacgcccagctaattttcgtatttttagttgagacggggtttcaccaggttggccaggctggtctcaaactcctgatctcaggtgatccacccacctcggcctcccaaagtgctaggtaggattacaggtgtgagccaccatgcctggccacaaaatttttttttaaccttttaatgtaggtaaaaatccacattcttatgcctccttataatccttttactaaaagtatattttactttccttatacatcttgcacataaattgtttcttcaatagttttacattcagggtaacacccctggtggcctttggaatgtgtccagacttgctggcttcttgcttctagcactcccattatctcaagtagccatacatttcaaagaaaatgctaaaccatcacatctgtagttcattagcttgatacatcgcttcctttcaacccccacatcctcaccccctgtttgtttgatcaccaataaatagtgtgggcttccagagctccgggcctttgcaacctccatactagtattggccccctggtcccactttctctctgaacttgtgttttctcattcctttgactctgctggacttcgtagcccccacggcctggtgttgggtctgatcaccccaaaaggttgatggccttttttttttttcctgcattgctgagagcttgggttattccttgcactgggtaggtcttgatttttcacgcctgaggccgccacaatagggcggggttcacctcctcaagagagagaaccagagaccacccccagaggggaatgtaatcccagacaagcccccaaattgttatatataaagtttcggtgccgcaaaaggaatatcactcaaatataaaattttccttttaattctcagcaaggctaggtacttctatatagaagggtgcacccttacagatggaacaatggtgagcgcacacttggacaagggaggggaaggggttcttatccctaatgcacgtggcccctgctgctgtttcgttcccctattggctagggttagacagcacaggctaaactaattctgactggctaatttaaagagaatgacgggatgagtgctttggcgggagtcagggcagagcaggtggcaggtgatcaaaatgagttagggtggagcaggagatcagaatgagtcagggtggagtaggtaatcaaaaaagattgctttacgaggaagttaagtttaaaagtagaaggtaaagaattgaacataatgacaattatttgaaaagaaatttagaactcatatctaataccctggaatataagaggaagttgcatgctgcctcctcggttttatcccaggtagctctagctttcttgctgcccacagaggcctggagcaggagagatgctaagatgccatggagtgcccatttggccactggcagtctgggcaggttgcccctttctgggtttgtggtgacggaggggaggccaaaaggcgcagactgagtccccaggtggctgcaggcagctccagcccagtcctgaggatcctcctcaccatggtcacctgccttagtaactgtgcccaggaagtggcctgctgcttgctgtgctgctgcttttcctacttctgcccttccctgccacccctcacatgtctcagttgacaagcaattccttgtctcccctggccccctagggaaagggctaagaaacagtccatgtacaccccgaccttactagcctaaggtgggcaaaggagtgtggagcagcctagagtacagagccctgggggaggagcccgctaataagggacgctctcctatagccatatttaaatgctagctaggctgaggtggacaagctctgccagctgctgtcatcttcagaagatagacgcagcagtaaggaatatttgttttgcttttttataaaatgtttaaaagcactgtggctaagaaacttcaggccgggcgcggtggctcatgcctgtaatcccagcactttgggaagccgaggtgggcggatcacgaggtcaggagatcgagaccatcctggctaacacggtgaaaccccgtctctaaattagcccgctgtggtggcgggcgcctgtagtcccagctactcgggaggctgaggcaggagaatgctgggagtggtggcatgcgcctgtagttccagctactctggaggtcaagatgggagtccagggcggttgaggctgcagtgagccaagatcgtgccactacaacccagcctgggcaacggagcgagaccttgtctcaaaaaattaaaataaaataaaaactcccacaaggaagaaagtagtcatctttatagagtcctctccatgtagtgttagcacaatcgctcaagaggcacccaatgtagagaaacgacggtgaggttagcagtaccaaggagcagggtttgaatcccggctcttgctcttttttttttttttttttttttttttttagtatttattgatcattcttgggtgtttctcagagagggggatgtggcagggtcataggatagtagtggagagaaggtcagcagataaacacgtgaacaaaggtctctggttttcctaggcagaagtccctgcggccctcggcagtgtttgtgtccctgggtatttgagattagggagtggtgatgactcttaagcatgctgccttcaagcatctgtttaacaaagcacatcttgcaccgcccttaatccatttaaccctgagttgacacagcacatgtttcagagagcacagggttgagggtaaggttatagattaacagcatcccaaggcagaagaatttttcttagtatagaacaaaatggtgtctcctatgtctacttctttctatgcagacacagtaacaatctgatctctctttcttttccccacatttcccccttttcttttcgacaaaaccgccatcgtcatcatggcccgttctcgatggtcgctgtctcttcagagctgttgcgtacacttcccagacagggcagcctggcagaggcgctcctcacctcccagacggggtggccgggcagaggcgcccacttcccagacggggcggccgaatcccggctctttcatgttttagctgttgggctttggggaagttattctacctctttcagcctgtgcaccctgtctcatcattaaaaaatgagaatgaggccaagtgcagtggctcatgcctgtaatcccaacgcttggggaagcggaggcaagagaattgcttgaggccaggagtttgagaccagcctgggcaacataatgagatcccaatctctgcaaaaaaatttaaaaattatctgggcatggtagcacacgcctgcagttccagctactcaggaggctgaggtgggaggatcacttgagcccaggaatttgaggctgtagtgattgctccactgcactctagcctgggtgacagaatgagaccctgcctcaaaaaaaaaaaaaaaaaagtgaaaagtgaaaatgataatacctactatgaaggattgctttaagaagaaatgagataatgtacacaaaagtacatcacatatcgcttagcatgtggctgagactcagaaaaaatcctggctttgttttcctgcattgggagtttattgttgtcaaagtgatggttccaagaagtcaaaggagagccagagaactggacagctcagcagcagttggtttgggtcaccaaatgcctctcttccctccctattgccactgacttagatcctggagatgtaaggttttaaaaacagcagcctattatcttttatttttggtaatccttgtaacctggttccctatcttaatgaaaaaaaccaatggttctggctttattacctaaagaaaggaatgacagtataataccaattataaataaatgggtcaaatttttggctttagagtttcaaagacttatggcattaaaaaaaaaaaaaagaaaaaatggaccgggcgcagtggctcacgcctgtaatcccagcactttgggaggctgacgcgggtggatcacttgcagtcaggagtttgagaccatcctggccaacatggtgaaaccccgtctctactaaaaatacaaaaattagccgggtgttgtggcacgtgcctggaatcccagctacttgggagactgaggcatgagaatcccttgaacccgggaggcagaggttgcaatgagctcactgcactccagcctgggcgacagagcaagactctgtctcaaaaaaaaaaaagaaaagaaaagaaaaaaagagaaaatgaagagttccttttctcaacactctcatcaatacatgcatgcacacacactcttgcatgcagccatgaattctcatgtgtgcatacacacattcaaaggactagataaagattctccagactttgcaatagggaagtcaggtggaagcagggagctagaatggataatgtatgaagaaactattaatgtgttttttccttttatactcttttgccttcagcaagtaaatgacctctttcttatttggttgtggcatcaaactgcttgtgaggagattaagattgtttcagaagaaatataaagagaaggaaatggtaatatgcatctattgaaattcaaaataggattttgcagcaagacaatggacttgaaaactggactatgagaaagaaattgttttctgcattcatttagctcccatttaacataatcaagagccagatctagaatcaagtttctaccaaaggaggaggtaatttaatctctcatctttgatttcctatatgtccataatgaggataataacagctacctcaacagattgtttccaaagggaacccttgtcttttgaagtggcaattagagctaggaagccaaagataagatatgaaaagaataaaagagaagcctaccacttctcatcttggagtttcaacaagacgaaggcagggaggtgagagtcaaggagatgccttggaattgggggaatggcttcagaaacatccagaaaacagaagagatcactgaagctgctacaaaattttgcccattgtagataagtgggcaaatcaggatgcactggcagggagacagggtctgttttgtgttaccagcccttttccagtgatgggtattgaattgagagccatgggcctgccatggggcatggggggtaggaagagggtgacctggcagcagaggcatgtggtttgcataacttggttaggagctgaatgggagacatggtagagattcaggggtcccactgggctaccgagagccacagggaggttgagtcagccagaaagcaccagtgagatcagatccagccaagagatccacgagaaactctaaatgttgactttagccaaaggcccccaggatgaatgtgaccaagtacatactgactcataaaccggaggagctggaggacactctgagaacccaaggacccttgctgtcctcctatacctgtccccaggagattgcttaagccactctatttattttcatgctcatgggtttgtgagttgtctgtggtttgtctaatcaggctgggcttgacagggcttggtaggactcctttagtcctggtccagtgtctattctgggtcacagctgaaggggcaatggatatctggaatttgcctttctcttgtcagatcacaggagtgcaagaggccaagccaaactacaaaagcacattgaaagcatctgcttgcatcgtgtcctctgacattctgttggcacaagcaagtcacacagcaaaggggatggatgtacacttaaataataaggaggaagcaaaggattgggaataacagtccaaaccaccacagggccctacctacccccaagaagtaatatcctcagattgatctgggaaatccaagagcagatgatgtttcccatgtgccaagaatatcagtggagtatcacacagagggccccaaaagccagcacgccaaggatgatggagcaggatgaagagaccctgggtcttagataatatcgttagggggcttactggctgctgacctccggacatttttgaaatatgaaacaattaaatgtctttattaactgacattattagctgagttttctgttgctttcatctgaatgcatcctcactgttgcaggactctatttttatttttatttatttatttatttttgagatggagtttcactcttgtcgcccaggctggagtgcaatggtgccatcttggctcactgcaacctccacctcccgagttcaagtgattctcccaccttagcctccccagtagctgggactacaggcatgtgccactatgccaggctaattttgtatttttagtggtgacaggtttcaccgtgttggccaggctagtcctgacctcaggtgatctgcccacctcgacctcccaaagtgctgggattacaggcttgagccaccacgcccagccttgttgcaggactcttattaaccctatttgtccatgagacccagagacataaaggcgggagtttgggttttttgttttgttgttttttcaggcagccctctgaaccaaaatgggttcagagagactccctggaggttgggtttgatctcagactttgtctccagagcacatgcttttacccaccattgtgttatcctaccttccaagcttgcgtgaggctgaagtgtcttatgtacttgtagtttattcaaaggataaagtggtaaaatgccctcatagtgaaaaagtgaaaggtctgtgcatggcagtaaaaaagtgccaatgtgaccttggtctggccggtagctggtcaactcaggaaagagtcagctcccagagacccctactcagttgtaaggcttgtcttgggattgccccagctttactcagagaggaatgttgtagtgaaggtgactccatccaacaatttagtcaaacctgcttgcttgaatcaggccctctcaagtacctcctcccttcattactctattctcctttgagatactgggaaggaaatttagcaaatagctggtctaagccatcagctctcagatccactctatagattaagatatctggatcacatggaaatatttgtctaagttgataccagggacagacccaaccatggtctgcccccaggaggtgctcagtcaggatttactaataaacaaacaaaccatcatctagtattaaggactgatgattgtcactaggatccagcgataacttgacttaaagttctatttgccagaatattcagggttattgacattcaagggaactgactgacgctagccaaagtcacacgagactgataggtaagctagaatacctgggacattgatttttccagtgagtagtgaattcttgttcctcagcctaaggcacttcctggtactaaggtgcagatgcagactaaacaagatgattacccaacatgagccagagggtcagaacctggtgagggaagtttctccagggccctgcagaagccactgagctatccgtgccttgggtggatttaggaattttgaaagtgtgacttaggccgggtgtggtggctgacgcctgtaatcccagcactttgggaggccgaggcgggtagatcacgaggtcaggaaatcgagaccatcctggctaacacgctgaaaccccgtctctactaaaaaatacaaaaaattagccaggcgtggtggtgggcgcctgtagtcccagctactcgggaggctgaggcaggagaatggcatgaacgcgggaggcggagcttgcagtgagccaagatcgcaccactacactccagcctgggcgacagagtgagactccgtctcaaaaaaaaaaacaaaacaaaaacaaaaacaaaacaaaacaaaaaaactggaaaatctagtcctgcccaagctcctctctctgtctttgaggggagccaatctccagaaatcgctgctgtcttccccattaccctgcatggctgctggctcccaggtgaccatcccagaatctccaagtgttcagggccacctctgctgcatctgccagaactcccaagcttcactgacctcctatgatgatggggcccctggtgctgacacagctcagcctctttatgagaggctcctgcacagagggaccaggactgcactgacacctccttgcctagggctctgcttccacagctgggctgtagcccttctttcttccggtcttctcctttgttctgaagcaggaggacttcccagggcattccagtttgccgtgtttctttcactcattccgccaaacatatttattggtggccaattttgtgacatcaatgtgctaagcactggggtagtggtgaacaaaagttaggtccctgtccatgtagtttagggtccagctgagaataccaacatttaatgagacatcacaatgaaatgtgctgagagtcatggaacagagacacctaatctagtgggagagaaagcaaagccctttctaacaatgtgaagtttatgatgagaactggagaatgagtagaaattagccccgtaaaagaatgggggcgaagaggcttactgttttatacaaattgcttccaatagcagaaaaatgcttcatgagataattacctagatacagagttataaccaacattaaaaacaaaacaagcggccaggcgtggtggctcacgtctgtaatcccagcactttaggaggccgatgtgggcagatcacgaggtcaggaattcgagaccagcctggggaagccaacatggagaaaccttgtctctactaaaaatacaaaaattaaccgggcgtggtggtgggcgtctgtaatcccagctactcaagaggctgaggcaggagaatcgcttggacctgggaggcagaggttgcagtgagccgagattgtgccactgcactccagcctgggcaacagagcaagactccgtctcaaaaacataaaaaaaaacaaagaaaagaaaactaaaaacaaacaagcaaagaaaaaaaaatgcctttcaaaaagagagtatactttcaaactattttataagacttaatataacctagtctggtagcagtggctcatgcctgtaaccccagcattttgggaagccaaggcgggtggatctcttgaggccaggagttcgagaccagcctggccaacatggcaaaaccccatctctactaaaaatttaaaaacatttttttaaaaaattaggcgaccatggtggcacatgcctgtaatcccagctattcgggatgctgagacacaagaatagcttgaaccttggaggtggaggttgcaatgagctgagattgtgccactgcactccagcttgggtgacagagcgagactcttatctcaaaaaaaaaaattaatataacctctataacaatattagacaaagacagtgaaagaaaggaaagctataggctaatctcactgacaaacatacctggaaaaatcctaaataaaagttttgcaaatgaaaccaagctgtgtgtgtgagcatgtgtgtgtatttgtgtacaatgctaacttgacaatgaaaaataaaaaatccataaataatgacttatttcacttagcataatgtttttgaggttcctcaccgttgtagcatataatgtatcactaccacattcctttttttttttctttccttgagacagggtcttaccattgcccaggctggagtgtagtggtgtgatcatgtttcactgtagtctccgcctcctgggctcaagtgatactccaacctcttgccttccgagtagctgggaccacaggcacgagtcaccatgtccggctaatttttttttttttttgaggaagcaatttctttaattttatcagaatccaggacacaagaagaaaaacacccaaaaaccacatggagacagaagacaagacacaactcctcccccactgcctccctgctctagagtggggacaaagtgggggtgagacagctggggggagacctgaacctcagtccagccctacaggctccaggcctgcagggaaggagggtaacggggaggcagggcccagccccccagtgtggggaaacagctgagggaaggcccccctcaaaaggctccacctcctcaccagcactcctgcccagggacagggagcccacagcagcaaggggacccccggggccatggccacgttcatgactgagaagcagctgagtggaggcaggagacacaagattatctgggcagaatcagttggggcaggggcctgggagggccccatgggccaaaccctaaggttacaggagggggcccaaagtggggctagtgagtgaggtcctgagtgagtgggtcagtggctgggcctctttctccagctgcctgtagcccctccaatactgctgccaggggggcccgcctccagggaaatgggataagaaagcagcctgcccctactgcagacagagccaggtggctgaggccaggaaggaaggcccagccaggccttgccacctgcccctagaggcctgtgggaaaaggacaggtcaggaagggtggggacaggggctcgaccagctcagacccaagatggtgccatgcttacttgctgagtcccccatgagctggggtactgcactggggccagcgactagttagacaggaggcagcagcttctcaagaaattccttcacagctgccatctcctgaggacaggagctgtgcatgacacccaggtatgtctggaactggaccctggcaggtgtgacaacagaccggagcttctcagccatcagggccccaaaccgtacgggcaccatggggtccagctccccatggcactggaggatggccaggtccttggcactgccattagctgcctgggggaaggcccggtgcagaggcggccagcagctcaaagccaggatgccagccagagggtgggggcaggtgagggccatgtagagggacagggcccggccctgtgaaaagcctcccaggatgatttgattggcagggatcccgttcttcatttcatgctcaatcaaggccttgatgttctctgctgccttcttgatgccagcctcgtcctctggggcatctggactcagccccatcaggtcaaaccaggagggcatcaccatcttcatgttgagggtcacagggatcctaggctcatgggaacagatgtacttgacgtgagggagccgaatggtggagagggcgtcagcccagctgtgccctgtgtctccaagtccatgtaaaaaaataaccacggccgtttcccgctcagctccagacacggtggcagcatcgttgagcaggggcacagacatggtgttaccacacatacaccacacggctccatggcaggggcctccactccctgggacttctgaggccgcttgggtgattctcctctttctcccgcagacacacactcttccccctcggccgcccccgccggaacactaatttttttatttttttatttttagtggacatggggtctccctatgttacttacctagcctggtctcaaactcctaggctccagggatcctcttgcctcagcctcccaaagtgctgggattaccacgctcagcccatcactccctgtgttcctttcatttatttttttctttgagacagagtcttactctgtcacccaggctggagtgcagtggtatggtcatggctcactgcaacctcaacctcccaggctcaagtgatcctcccatctcaacctccctagtagctggcattcctttttatggctgaataatactccattgcctgtacagatcacaatttatttatccattcatcagttagtgggcatttgggctgttttcaccttttggctattataaataatgttgctataaacatttgtatacaagtttctgtgtggatatatatcttcatttttcgtgggtatatacctgggagtagaattgctggatcatctcatagataaacaaagccagacactagctaaagtggtaaggacaggacaggcacagaggctcacgcctgtaatcccagcgctttgggaggccgaggcaggcggatcacttgaggcaaggaattcgagaccagcctgaccaacatggtgaaaccccatctctactaaaaaacaaaaattagctgggcatggtggtgcacacctgtaatcccagctactcaggaggctgaggcaggagaatcgcctgaactcgggaggcagattttgcagtaaaccaagattgtgccattgcactccagcctaggccacatagcaagtctccgtctcaaaataataaataaataaataaataaataaataaataaagtggtaagaacagattttaatcagtgacatattattgcaatagggaaaagagcctagcttgaactgaactcaactttgatttgtagagataactgggcattttaaagcaagaatgaaagaacagagagggtgagtggggactcaatgacgtcagagaagtgacagattacaaaaagtgggaagggggttggtctgtgttaagcccacctggccttgttagctggggcttatcattaggctcctacactctcacagcagctgggaaacaggggccttaccttcatctgtgggctggaacaaacagtacattcttttggcagccttgagttctctcagtcagacactttaaagggcattagggtcatcctagagatgtggccttgaactgttagaaactatgttagtgttcatgaaagtctttatcaagtcggacgcagtagctcatgcctataatcccagcactttgggaggccgaggtgggcgggtcacttgaggtcaggagttcgaaaccagcctggccaacatggtgaaaccccatctctactaaaaatacaaaaaaaactagctgggcttgggggcaggcgcctgtaatcccagctactcaggaggctgaggcaggagaattgcttgaacccgagaggtggaggttgcagtgagctaagaacgggccattgcactccagcctgggggcaacaagagtgaaactctgtctcaaaaaaaaaaaaaaatcctggtttttttttttttaccttttttttttttttttgagacggagtcttgctctgctgcctaggctggagtgcagtggtgcgatctcggctcactgcaacctccgcctccctggttcacgccattctccttcctcagcctcccaggtagctgggactacaggcgcctgccaacacaccccgctaattttttgtatttttagtagaggtggggtttcactgtgttagccaggatggtctcgatctcctgacctcgtgatctgcccgcctcagcctcccaaagtgctgggattacaggtgtgagccaccgtgcccagcccctggttatctttttgtaccttttgaaatatatgtaaatatgctggttttgcaaacattaaattaataataaaagccatgccatagcagactacatcatatataggtatataaccaataaagaattactgtctagaatttacaaagaactccacaaatcgatatgaaaaagacaaccaacccaagagaaaaaaaaatttaaatataggaaagacaatccctcaaagagaaaatagaaaatgcaaattaatactgacattttgggcttcaaaaaaaagcaaattaaaataacgacaagggctgggttcagtggctcacgcctgtaatcccagcgctttgggaggctgaggagggtggatcatgaggtcaggagttcaagaccagcctggccaagatggtgaaaccccatctctactaaaaatacaaaaattagccaggtgtggtggcaggtgcctataattcccgttactcaggaggcagaggcaggagagttgcttgaacccagggagggggtgggggcgcagaggttgtagtgagctgagatcataccactgcactccagcctgggcaacagtgagactccgtcttaaaataaataaataaataaataaatacatacatacatacataaaataaaataacgatgaggtgaaaaaaataaaattaataaaattaaaaataaaataataaaataacaaggcgacattcattaaattggcaaagacaggtttgggaatatcagatgttgctgaagctccagggcaacagggactttcttctagtggatgggagcgtaaaccagaaaaaccactgtggagaccatttggcaatatctagtagagttgataatacaactctacttatgagcttatacccagcctctcccacatttgctcaagaaggcatgcagaagtatgttcattgcagcattttttaatataacagtatataaagtaattggaaatactttaaaatccataaacagaagaatggatacattatttgtgatatatttatataattgaatattaaagagctgcgttatcccacatggtagcaatgagccacatgaggctatttaaacttaaatttaaataattaaaattacgtctatgtttcacattttaaaaatttaaatttagttccttggccaggcacggtggctcacgcctgtaatcccaccactttgccgaggcgggcggatcaggaggtcaagagatcgagaccatcctggccaacagggtgaaaccccatctctactaaaaatacacaaattagctgggtgtggtggcacatgcctatagtcccagctactcaggaggctgaggcaagagaatcgctcgaaccctggaggtggaggttgcagtgagctgagatcacgccactgcactccagcctggcgacagagcaagactccgtctcaaaaattagttcctttgtcacattagccacatttcaagtgctcagtagccacatgtgattagtgagtacccatattagacaatgctgatatagaaaatttccatcattgcagaaagttctattggacagcactgttctacaacataaaatgagctaactgggtctaaatatttcaaaaagaaaaaaaaacaaaaaacatcaaaatataagactcaaaaatatgaagttcatcagaaaaagaaggcaagttgtagaacacatagaatatcctcctatttaaaatttggtacagcatgatgactatagttaataacaatgtattgtaggcgcggtggctcacacctgtaatcccagcactttgcaaggctgaggagggcagatcacctgaggtcaggagttcgagaccagcctggccaatatggtgaaaccccattgctactaaaaatacaaaaattagctgggtgtggtggtgcgcacctgtagtcccagctacttgggaggctggggcaggagaatctcatgaacccggaaggcagaggttgcagtgagacgagatcacaccattgtacctcagcctgggcgtcatagcaagactccctctcaaaacaaacaaagcaaaacaggccaggcatggtggctcacgcctgtaatcccagcactttgggaggccgaggggggcggataacgaggtcaggagattgagaccatcctggctaacacggtgaaaccccgtctctactaaaaatacaaaaaaaaaattagctgtgtgatggctgacgccggtagtcccagctacttgggaggctgaggcagaagaatggcatgaacccaggaggcggagcttgcagtgagccgagatcgcgccactgcacttcagcctgggtgacagagcgaaactccgtctcaagaaaaagacaaaccaaaccaaaccaaaccaatatattgtattcttgaaaaatgttaagagattgaatgttgtgttctcaccacaaaaatggtaattatgtgaggtaatgcatatatgttaattagctagatttagtcattccaagtttatatatgcttcaaaatagcatgtaatacctatggaaactaagaattaggctgggcacagaggctcacacctgaaatcccagtgctttggtaggccaaggcaagaggattgcgtgaacccaagaatttgaaaccagcttgggcaacataggcaggccatgtctctacaaaaaatacaaaaaattagctgggagtggtggctggagcctgtagtcccagctataggctgaggtgggaggatcactggagcccaggtgtttgagactgcagtgagccttgactgtggcagtgcaccccagcctgggagacttgtctcaagaaaatactgaaaataaaaataaaaaagcaggccaggcgcggtggcttacgcctgtaatcccagcacttcgggaggctgatgtggatggatcacttgaggccaggagctcaggaacagtctggacaacaaggagaaaccccatctctatcaaaaaatacaaaaattaactggacatggtggtgcatgcttgtagtcccagctactctggaggctgaggcatgagaatctcttgaatccaggaggttgaatttgcagtgagccaagaagatcactctactgcactccagtctgggtgacagagctagaatttgtctcaaaaataaataaataaatatttaataaataaataatcaaaccaaaaccaaaccatcatgtcctatatgataaatatgtaaaatttatctgtcagtttaaaaataataggctgggcacattggctcatgcctgtaatcccagcactttggaaggccaaggcaagtggatcacctgaggtcaggagtttgagaccagcctggccaacatagtgaaaccctgtctctactaaaaatacaaaaattacctgggcgtgtaatcccagcactttgggaggccgaggcaggtggatcatgaggtcaggagattgagaccaaaaaaaaaaaatttttttgagacagagtactctgtcacccaggctggactgcagtggtgtgatcttggctcactgcaacctctgcctccccagttcaagggattctcctgcctcagcctcccgagtagctgggattacaggtgcccacaaccatgcctggctaatttttgtatttttagtagagatggggtttcgccatgttggccaggctggtctcgaactccttacctcaggtgatctgcccatctcggcctcccaaagtactgagattacaggcgtgagccaccacacctggcctctaagaactcttttttttttttccgagacggagtcttgctctgtcacccaggctggagtgcagtggcccggccataaaaactcttgaacaagaatggatgggggctgggcacggtggctcatgcctgtaatcctagccctttgctgaggttggcaaatcacttgaggtcaggagttggagaccagcctggccaacatagcaaaacactgtctctactaaaaatacaaaaagtagccaggcgtggtggaaggtgcctgtaatctctgctactcagaaggctgaggctggataatcccttgaacccaagaggtggaggttgcagtgagccgagatcttgccattgcactctggcctaggcaacagagtgcaactgcctctcaaaagaaaaaaaaaaagaattgatgggttggcagggtactgacacttggaggtgctgggagggtggtgcccagatgggccatggaagcgccaagcctcttcctcccaaaagctcaccctatgcatcttttaaatccagctattcatctatatctttaaaacgtcctgcataattaagtgataaacgtgtttccctgagttctgttagcaatcctagcaaattatgaagccaaggagggggttgtaggaaccctgatttatagcaggtttgtcagaagcacagatcacagccttggtcttggaattggcatctaaagtgggaggcagtcttttgggactcagccctccccctgtggaatctgataccatctccaggtagctagtggctgaattgaatcaaataggccactcagtatttgctggatagttaactgtttggtgtgtggagaaaaagtcccatacatctggtcacaagtgttttgtgttgtgtgagcagacagggagggtcttcagggattacagaaatttaatcaccctgagcaattggcttgttttacagcctcctgccgtgcagcctcttttttcctaaaccctgtgttgactgcagtcacctagttggttaaaactggctcctggcagaccccagaaacttgtagataaacctgagtgaaagttcctcattaccatgctgaaatctccatcctgggaggagctgtggcttcattctcatagcatgtgacctgtgtgcgggcgtgaggattcactgtgtttccaaaactgggacccctcctctacatgcaatgaggcaccctctcccctccccatcaccccctaaaatcctcctgtcacttctctccgggagacactgctttgaagaatcctcccagtgctctccttacttgtaattaaactcctgttgattaaaacctgccttgtggagagtcatttgttatttgccaggcaaacaaaccctgttttttttcaggtaacaagagtatggtggaagaaaacagtttaggtcaggcacagtggtgcatgcctataatcccagcactttgggaggccgaggcaggtgggaggaacacttgagcccaggtgttggagaccagcctgggcaacatagtgagacaccccccaactccacccccataaaaaaaaaaagaaaaaaagatgtaatcccagcactttgggaggctgaggcaggcggatcacttgaggtcaagagttggagaccagcctgggcaacatggtgaaaccccgtttctattcaaaatataaaaaaattagccaagcatggtggtgggcgcctgtaatcccagctactccagaggctgaggcaggagaattgcttgaacccgggaggtggaggttgcagtgagccgagatcctgccattgcactccagcctgggtgacagatcgacacttagtctccaaaaaaaaaaaaaaagaggccaggcacagtggctcacacctgtaatcctagcactttgggaggccgaagcgggtggctcacctgaggtcaggagtttgagaccagcctggccaacatggtgaaaccccatctctactaaaaatacaaaaattagccgggtggggtggcacgggcctgtaatcccagctacttgggagactgaggcaagaattgtttgacccgggaggtagaggttgctgtgagttgagatcgtgccaatgcactccagcctgggtgacagggtgggactctgtctcaaaaaaaaaaaaaaaaaaaaaagtttgtgtttacagttgtataaggaagtggtgtctgtgaggtttgctgaggctcagaaattaataccccaaaatatgccaacatgctgaactgaagaagaaacttcaaggtttctctgacctctcttctcaaccagctctcccacaggcaggatgagttattctctgaagttcctttatctgcttcaagtccagacataccacaaagaataattgttttctcttcccctccctgtaagatcaggaatggaatcacacctgagcaggtcctttcccaaaagagtctgtctctcagctcattcacattccacagggaactattcaaaactcaatctctatctctgggcccattcattctccctaataatcgcctatggcccctcaagagaattcctgttccctatcccataacctgttttgccaggatggtaaataagctcctgaaccctgttgtggattggttaatcactctgtggttctctctgtgtacacattaatccatttatatgcctcttctccaatgcaccttttttttttttgttttgttttgttttgttttttggacagactcttgctctgtcgacagggctggaatgcaatggcacaatctcagctcactgcaacctccacctcctgggctcaagtgattctcctgtctcagcttcccgagtagctgggattacaagcacacgccactgtgcccagctaatttttatattttcaccatgtttccaggctggttttgaactcctgacctcaggtgatccacccgactcagccccccaaagtgctgggattacagatgtgaaccaccgtgcccagcctgcatctatctttcgtgagttaattttccagccaaccttcagagggcgaaagggaagttttcctttggcccatacaggttcattatagctattctatgtagttttctacttaagtatgtcataatttcaaaagagaaaaagagaagggagaaaattgttctaagctttcaatgtgaaggcctggcacttttaaagaataacagcttctgtggccagacttttagtatcagtatggactttccctggagaagtccagccagatgggcagactgggcagatgcttatactgattagctagatttagctaatgggcagagccgtcacaatgcactggttgaaatggtgcaaaaaaataatgtaaggcttttttttttttggtacaggatctggctctgttgcctatgctggagtacagttgctcaatcttggctcactgtaacctccgtttcctggactcatgccatcctctcgcttcagccttctgagaagctgggactacaggaatgcaccatcacacccggctaatttttgtattttttgtagagatggggtttcaccgtgttaactaggctggtctcataaccgcccaatgtgtttaccttgcccgctgcctagacagagccgatttctcaagacagaggaattgcaatatagaaagagtaattcacgcagagcctgctgtgtgggagacaggagttttattattactcaaatcagtctgcccaagaattcgaggagcagagtttgtttttgttgttgttgttttgttctgttttttgagatggagtctctctctgtcacccaggctggagtgcaatggcaaaatcttggctcactgcaacctccacctcccaggttcaagtgattctcctgcctcagcctcagtagctgggattacaggcctgtgccaccatacccagctgatttttgtatttttagagacaggatttcaccaagttggccaggctggtcttaaactcctgacctcaggtgatccacctgcctcagcctcccaaagtgctgggattagaggcacgagccacctcgcccagcctggggagcagagtttttaaggacaacttggtgggtcaggggaagccagtgagccaggagtgctgattggtcagagatgaaatcatagggagtctaagctgtcttcttgcgctgagtcagttcctgggtgggggccataagatcagatgagccagttaatcaatctgggtggtaccggctgatccatcaagtgcagggtcgacaaaatgtctcaagcactgatcttaggagatgtttagggagggtcagaatcttgtagccttcacctgcatgactcctaaaccgtaatttctttctttctgttttgttttcttttttttcttgagacagagtttcgctcttgttgtccaggctggagtgcaatggcgcaatctcggctcactgcaatttctgcctctggggttcaacccattctcctgtctcagcctcctgagtagctgggattacaggcacatgccaccacgcccagctactttttgtatttttagtagagataggggttcatgatattggtcaggctggtctcgaactcctgacctcaggtgatccgcccgcctctgcctcccaaagtgctgggattacaggcatgagccactgcacccagcctaaaccataatttctaatctgtgttagtcctacaaaggcaatctagtccccaggcaagaaggaggtctgttattgtctttgttttaaagggctattaaaacaaagggaaagggctattattgtctttgttttaaattataaaccaagtttctcccaaagttagttcagcttaggcccaggaatgaatgacagcttggaggttagaagcaaaatggaatcggttaagttagatttctttcactgtctcagtcataattttgcaaaggcagtttcagtctctaactcctgcgctcaagcaattcacccacctcggcctcccaaagtgttgggattacaggcatgagcaaccatgcccaacctgtaaggcctttttaaaaaaatataaaatcagatatgaagttttctttggactgggcgtggtggctcacgcctgtagtcccagcactttgggaggctgaagcacgtggatcacctgaggtcaggagttcgagaccagcctggccaacatggtgaaatctcatctttactaaaaataaaaataaaaactatccagccgtggtgatgggcgcctgtaatcccagctactcaggaggctgaggcaggagaatcatttgaacctgggaggtggaggctgcagtgagccgagatctcgccatcgcaaatcagcctgggcaacaagagggaaacacacaactctgtctcaaaaaaaaaaaaaggtttctttgaagaattgttgccagaaagtggtcatgatccaaaccccaagagagagttcttggatctcatgcaacaaagaattcaaggcaaatccataaagtgaaagcaagtttattagagaagttaagaaacgaaagaaggttactccaaaggcagtgcagccctgagggctgctgtttgcccattgttaagttatttcttgattatatgctaaacaagaggcaaattattcatgcctcccctttttagatcatatagggtaacttcctgatgtttccatggcatttgtaaactgtcaggttgctggtgggagtgtagcagtgaggacaaccagaggtcattctcatcgccatctttgtttcggtgggtttcagccggcttctttactgcaacctcttttatcagcaaggtctttgtgacctatgtcttgtgccgatctcctatctcatcctatgacctagaatgcctcaagtgtctgggaatgcagcccagtacgtttcagcctcattttatccaacccctattcaagatggagttgctctggttcaaatgtctctgacagaatggaagtcccctttctatttgtttgttttaaaaaataaagtcaggccgggcgcggtggctcatgcctgtaatcccagcactttggaaggccgaggcaggcggctcatgagccgggcgtggcgagcgcctgtagtcccagctactcgggaggctgaggccggagaatggtgtgaacccgggaggcggagcttgcagttagccaagatcgcaccactgcactccatccagcctgggcgacagagcgagactccgtctcaaaataaataaataaataaataaataaataaataaataaataaataaataattaaaaaaataaaaaataaagtcagagtttctgctatattgcccaggctggagttcagtgactattcactgacgagatcactgtgcactataacctggaaatcctacagtcttgaactcctggactcaagggatcctcctgcttcagcctccagcgtagctgggactacaggcacgcaccaccacatcaggctcagaagatcacttttaattagcaaacggctcactagcaagatttgaaaaacttcaaaaagctaagtataactctcaaatcgaatgcatttttactttgcacatactgttctcaagattctggcatccaagaaaaaaaaaataatacttctcctagggctaataaatttgtaaagacttgctattacatgacttgtttcaaatgtttgcagcatattgtttatataaattataatggtttccgtgaaatttaataatggttcaaaatttgtatcatttgagataagtgaggcatcagtgaatttactatgcttttcccacgttgtgttatattcaaagacaaaaatctatggctaggtatggtggcatacgcctgtagtcccaactactcctcagactgaggcgagagaatcgcttgaacctgggaggcagaggttgcagtgagctgagatcgtgccactgcactccagcctgggtgacagagcaagactttatctcaaaaatttaaaaataggccgggagcagtggctcacacgtgtaatcccagcactttgggaggccgaggcaggcggatcacgaggtcaagagattgagatcatcctgcccaacctggtgaaaccccgtctttactaaaaatacaaaaattagcagggcattgtggttcgcacccgtggtcccagctactcagaaggctgaggcaggagaatcgccaagatcacgccactgcactctggcctaggcgacagagcaagactccatctcaaaaaaaaaaaaaaaaaaaaatagaaacacagtggctcacaccagtcagtaatcccagcactttgggaggccaaggcaggtggatcacgagatcaagagttcgagaccagcctgaccaacttggcaaaaccccatcacaaaaaacaaacaaacaaaaaaactctcggcaaaacagagcaaggctccatctcaaaaaaaaaaaaaaaaaaaaaaattagccaggcgcgatggcggttgcctgtaataccagctactcaagaggctgaggcaggagaatcacttgaacccgggagctggaggttgcactgagctgacatcgcaccattgcactccagcctgggtgacagagcgcgactctgtctcaaaaaaaaaaaaaagaaagtgatcacattttgggaatgcattgactataccctaaaaagctcaggagaatatacagttgaggctgggtgtgatggctaacgcctgtaatcccagcactttgggagggcgaggcaggtggatcacctgaggacaggagtttaagaccagcctggccaacatggtgaaaccccatctctacaaaaatacaaaaattagccgggcatgatagtgggtgcctgtaatcccagctatttgggaggctgaggcaggaaaatcgcttgaacccgggaggcggaggctgcaatgagccgagatggcgccatggcactccaggctgggtgacagagcgagactccgtcttgaaaaaaatgacatcactatacttcacatgggctcatttattgtcattattattattattttttgagacagagtctcactctgtcgcccaggctggagtgcagaggtgtgatctcggctcactgcaacctccacctcccgggttcaagtgattctcctgcctcagcctcctgagtagctgagactacaggtgcccgccaccacgcccagctaattttttgtatttttagtagagaccgggtttcaccatattggccaggatggtcttgatctcttgacctcgtcatccgcccgcttcggcctcccaaagtgctgggattacaggtgtggcgctcatgtattttgtaatatattttcttttcttctttctttttttttttttgtgtgtgtctgtgtgtgtgtgtgtagaggcatggtctaaatatgttgcctgggctagtctcaaactcctgggcttaagtaatccacccactttagcctcctaaagtgttgggattacaggcatgagccattgtgcccagcctgttatagactttaaaataaatttgtttatgtatttgcttataccctgcacaccctaagtgcagtgtagcctcaacatgtccaagcagagcccttgaccttctccacaaaactcctcctcttttggtgcctgtctccctgtgactgactttgccagccacccagttgctcaagccaaaaatctgacattctccctccaactaccttctctgctcgccccacccatttcatgtcttatccatctccaggtcctgctggttctgcctgttaagaaccttccacatctctgacctctctgcatcttcacaactacacttttgttcaggtcctcttgcctcttgcctggatgactacagtggtgtcctaactatctttcctcatcctcacccaattactgccaatctattctccattttgtagctagcgtgttctttcaaaaatgcaaataccttcacatcactgcctaaattaaagagcaccccctctcattgctgaagtgtaaagtcccatgatctgatatgttcccttatcaactaacaagggccctacagttaagaaaaccaaagttacttctggctgggagtggtggctcatgcctgtaatcccagcactttgggaggctgaggcgggtggatcatgaggtcaggagttcaagatcagcctgaccaacatggtgaaaccctgtctctactaaaagtacaaaaaattagctacgcatggtggcgggcgtctgtaatcccagctactcaggaggctgaggcagagaattgcttaaacctgggaggcggaggttgcagtgagccgagatcgcaccactgcactccagcctgggcgacagagggagactccatctcaaaaaaaaaaaaaaagaaaagaaaaaaagaaaactaaagttacctacaggtagagggttcagagtctggctggcatggcaaatttctaaattcctatggctataagaaaagccatagtcttactataaactctctaacaatagggagttaggagctatcagacccctcttaactatgatttacaacccagatcactacaactccgagtagacgaaggacaggccttccaaacattctgtttttattttattttattttattttatttttttgagacggagtctcactctgtcgccaggctggagtgcagtggtgcgatcttggctcactgcaacctctgcctcccgggttcaagtgattctcctgcctcagcctcctgaatagctgggactacaggtgtgccaccatgcccggccaattttttttgtattttcagtagagatggggtttcaccatgttggtcaggctgttcttgaactcctgacctcaggtgatccaccagccttgggctcccaaagtgctgggactacaggcgttagccaccatgcctggctgaatgtgatcgccttcaatgatggcagcacccctacattttacacaggaccaccagtagggtggataggtgagcggcctgtaggtggaatgagaagggcagtccctttcttttccttctttttttagtagagaagtggtctcactatgttgcccaggctgatgctgaattcctggtctcaagcaatcctcccaccttggccttccaaagtgctgggattataagggtaagccactgcaccaggccaagcagtcactttgacataaagaaagtccatcccttgaccagcacagctaacctgggagagcagaaggtcagcacatcaattgaagagaagagaggacattaatgggaagagcctgttgggttgtggaacaaccttcctgaaagctttgagaggagataggcagagctattcccagaggacaatctggcatgtagcacagaggctgtggagtggatgggatgactttcctgggtgccagtgaagcatgtggcgcgacaccatcagtgagggacacacaggacgaaggactcctttgactacctgccactctaaggtaacagagataccaccacagttggaacacaaagaatgggggcgggggagccatcactaggacccacacatacagctcaagcttaagggtcaaagtggaccagccggtagcccaatcatgtgcgatccataaaagaaatacctctctgctagcagaattgatcctacaaggctacagaaccccatgagcgcccaatgggagcgagttctctgctggcacaggctggcccttggctctgtagagtgacttaggaaatttcaaggaagatactccaaagtgcagagtcccttcaaacacagggtccgaggcagggcccaggccactcaggctactccacggtactctgtggaggcatagcaacaatgtctaggctgggtgcagtggctcatgcctgtaatcccagcactttgggaggccatggaaggcagatggcttgagtccaggagtttgagaaataacagtggcttaaacaagagacaagtgaatttttcctgtaagcaaattctgagataaccagtccaggactggtgcagaacttccaagattaccaggaaggcaagacatttctaatttgtggttcttttttctttttttttttttttttttgagatggagtctcactctgtcgcctaggctggagtgcagtggcacaatcttggctcactgcaaacttcccctcccgggttcaagcgattctcctgcctcagcctcccaactcccaagtagctgggattacaggcacatgccaccacgcccagctaatttttgtatttttagtagagacggggtttcaccgtgttggccaggctggtctcaaactcctgacctcaggcgatctgccctccttggcctcccaaagtgctgagattagaggtgtgagccaccacgcccggtgaagcttgtggttcttctattctcaacaaatggcatggtttgacggggaagggcatactccttcctttagggctctccctgaaatgtggatatattacttccatttgtgctctattggccagagcactgtccattgccatacctagtctcaagagaggctgggagttgagatcttttttggtggccatgtgtcttgcaaaaaaaaaaatctagggtttattaacacgaaaagattggagaaacaatactggggggaaactaacagcctctatcaaaggctcagtgtcagtatcagtattatgctcagctgtgagaggctggaccaaggttgagagcctgagccacagcaccctgtgtgggcaggacacccctgggcaggcctgtagcactcgaggtggccgggcagaaaaccttgccctgtggggatctctatagcagatggtggcaaactgcatgatgcagaagaaaaggagtgtttactctttttccccatgttgcccaggctggtcttgaattcctgggctcactccagcacagactttgcccctgtaaaccttcacccttccccatcctggaagtagggaatcccgaccaactgacagatttgtaggagactcctgctcctatccccagggtaaagccttcatggtctgccccctcctacccatcccgccagcctcagctccccagactgttccgtgctgcagcccttctcagttctgcacacttgatgagcccggctctggcctgtcgtgccctgctgctgctgctcagggatacgtacaattgtacagactgtgctaagaacttcacatgcatgatctcttttagtttttgtcgctgcctctctgctcatctgtactcctcactgggcaggaactttgagaaatggaggcccacatctgttgtgttcactgctgtaatcccagcaagcagcatggtgcggcaccttcacagggcctctggctccagatcgttggcacacagtaagtgtttctttttttaaaattattattattatttttatcgagaaggagtctcgctgtgttagcccaggctggagttcagtggtgcgatcttggctcactgcaacctccgcctcctgggttcaagcaattctcctgcctcagcctcctgaatagctgggattagaggcccgccaccacgcccaactaatttttatatttttagtagaaacgcggtttcaccatgttggtcaggctggtctcgaactcctgacctcatgatccgcctgcctcaccctcccaaagtgctgggattacaggcgtgagccactgcacccagccataagtgtttcttatgttgaatttgcagcttgtataaaaatgaaccaagacattatgaaatacagtcactttttttttttccttttgtgactaatttttcttaaggagcagtgatcagggaaaggaagatgtttccctagaactcctctagagggcatatcttccctggatctttgacattgattttcggagcggtaatggatcttacacaaggagtggccatcccctaggaggcctgtccacgcagatggagggtgtggtggtgctgagtgatgtctccctggcagcttggactggagaccctagagggaggtcttcatgtccaaaggcagggatctggaagaaggggaatgtgtgtgcacagactgccccctgcccttttttttttttctttgaagacaggatctcactctgtcacccaggctgaagtacagtggtgtgatcattactcactgcagcctcgacctcccaggctcaggtgatcctcccacttcagcctcccgagtagctgggactacacctatgtgccaccatgcctggctaattttttgtagagacagggtttccccatgtttcccaggctagtcttgaactcctgggctcaagcaatccacccactttggcctcccaaagtcctgggactacgggcatgagctactgtgcctggtctagactcccccttttttttttttttaatgagatggagtttcactcttgttgcccaggctggagtccaatggcgcaatcttggctcaccacaacctctgcctcccgggttctagaaattctcctgcctgaacctcctgagtagctgggattacaggcatgcaccaccacgtctgggtagttttgtatttttagtagagatagggtttctccatgctggtcaggctggtctcaactccccacctcaggtgatctgccagcctcagtctcccaaagtgctgggattacagattacaggcatgagccaccgtgcccggcttttttttttaggcggagttttgctcttgtcgcccaggctggagtggaatggtgcgatcttggctcactgcaacctccgcctcctgggttcaagcaattctcctgcctcagcctcccaagtagctgggattacaggcacccaccaccacgcccagccaatttttgtatttttagtagagatggtgtttcaccatattggccaggctggtcttgaactcctgacttcaggtgatccacctgactcagcctctcaaagtgctgggattacaggcgtgagccaccacaccgggcctagactcccatttttatttaacgtcttccatttcttatcagagaaatgataataaaatatagaaaagcacaattctttattttaaccccacctctcgctcacttaaatgaccagttatttccaagtctggatctgaaaatttctattatgagagactctccaggaccttcattcagttccacgtgtagttgtgacattgtgtgatattggcacacggttggaaataacacttgtgtagcagtttgagatgaaatataggcaatgcctggcttctgaaagtgccttcaggcctgatgttacacaagcattctcagcccaacttgcctcccctcctatttctatctctacctttagctgggtatttggatagttcaggggaaaaaggggtaaagatgagatgacaaaagacaccccagccgctgggcccagcactttgggaggctgaggtgggtggattactgaggtcaggagttcgagaccagcctggccaacatggcaaaaccctgtctctacaaaaaatacaaaatttagctgggcatggggtgcaggcttgcagtcccagctatttgcggggggaggggagctgaagcaggagaatagcttgaacttgcaaggtggagtctgcagtgagccgagattgtgccactgcactccagcctgggtgacaaagtaagaccctggctaaaaacaaacacacacaaaaatatatcattatgcatttctgaaagcaaatgtgctataatactgctttgatctgaatgtcccccaaaattcatatgttgacatttaatctcaactttggtggtattaagaggtgaggttgtttgggaagtaattaagtcatgaggactccactcccatgaatgaattgagggaaagggctggagggaagggctggagggaactagcttcggcccttttttgtccttctaccatgtgaggacacagcattcatctcctccggaggatgcaacaacaaggctctatgtgaagaaggaaccaggtccctcaccagacactgtacctgccggcaccttgatctttcacttcccagccctccagatctgtgagaaacacatttctgttgtttataaattactctgtctcaggtattttgttatagtagcacaaacagacttagacaaataacgttttatgtttacaacccataggaggaaaattctggatttggaatctatcttggcaagataatacatagatatgattataagaaaatcagtgaggtcataaacagtggcttaccaacataggttggtatacaaatataacttcacataacaaatatagttgacttgaagtaaacaaacacaatctactatagcattctgacaaatgtagtttcctataacaaataatcaaagccttaagtttcaggttacagttttcagagttagtagtagccaattactgccaggcatagtggctcaaacctgtaatcccagcactttgggaggccaaggtgggaggactgcatgagcccaggagtttgagaccagcctgagcaacatggtgagaccctgtctctattttatttcattaaaaattttaaaatattggccaggagcagtggctcatgcctgtaatctcagcactttgggaagctgaggcaggcggatcacttgagatcaggagttccagaccagcctagccaacatggtgaaaccccctctctactaaaaatacaaaaattagcctggcatggtggtgcacacctgtaatcccagccacttgggagactgagtcagagtcgtttgaacctgggaggcagaggatgcagtgagtccagatcgcaccactgcactccagcctgagtgatagagtaagactctgtcttaaaataaataaaaaaaaattatttaaaaaaagaagtagcctatctcagaggctacgcgactttattacagttttaaaaatggaatggtaggccaggtgcggtggctcacacctataatcccagcactttgggaggctaaggcgggcagatcacgaggtcaggagttcgagaccagcctggccaatatggtgaaaccccgtttctactaaaaatgccaaaattagctgggcatggtggcggatgtctgtaatcccagctactcaggaggctgaggcaggagaatcgcttgaacccgtgaggcagaggttgcagtgagccgagaacacgccactgcactccagcctgggggacagtgcaagactccgtctccttggccaggcacagtggctcatgcctgtcatcccagcactttgggaggctgaggcgggtggatcaggaggtcaggagatcgagaccatcctggctaacatggtgaagccccatctctattaaaaatataaaaaattagctgggcgtagtggcgggcgcctgtagtcccagctacttgggaggctgaggcaggagaatggcatgaaccccggaggcagagcttgcagcaagccgagattgcgccagagccagactctgtctcaaaaaaaaaaaaaaaaaaaaaaagactccatctccaaaaaataaaaaattttaaaaatggaatggtagttacctttgctagagactgagcatgcataaaagtaatcttaaataactttttcgcctttggccaaatgttggttcattgtgatttggagtctaccattactataactgtatctgtacctataccaatatctgtacctgtacctatacctacatatgtacttatacctataccatctgtcctcccctgaaagacctcatcaaagttctcatcttgcaatgtttcctgttaaatatcatcatgactacttttaacctatttgaatcaaggctgagttacagccttttaaatttttgaataatttttttttttttttgagatggagtattgccctcgttgcccaggctggagtgtggtggcacaatctcggctcaccaaaacatccacctcacgggttcaagcaattctcctgcctcagcctcctgagtagctggaattacaggcacatgccacaatgcccggctaattttttttgtatttttagtagagatgggatctcaccatgttggccaggctggtctggaactcctgacctcaagtggtccttctgccttggccttccaaagtgctgggattataggcatgatccaccatgcctggcaatttttttttaagagcacaaatccacgtttatttattgacttttcttttttctttcttctctttttttctctttttctttttttcttttttttgagacggagtctcgctctgttgcccaggctagagtgcagtggcacgatctcgactcactgcaacctccaccttccaggttcaagcagttctctgcctcagcctcccaagtagctgggattacaggtgcccgccaccacacccggcttttttgtatttttagtagagacggggtttcaccatcttggccaggctggtcttgaactcctgacctcgtgattcacccgcctcagcctcccaaagtgctgggatgacaggcgtgagccaccgcacccggcctattgacttttcattagtttaaatccttgaagggtacagcatcactcggattctgtgtccaatagccttagtgggaagattgcttcagaatttggcacgaatcatgtcactgtttccgtgggcctgcctcagcctcccgagtagctgggattacaggcggccgccaccacgcctggctaacttttttggttttttttttttttttttttttttgagatggagtctcgctctgtcttccaggctgtagtgcagtggcgcgatctccgctcactgcaagctccgcctgccgggttcacgccattctcctgcctcagcctcctgagtagctgggactacaggcgcccgccaccacgcccggctaattttttttgtatttttagtacagagagtttttcaccatgttagccaggatggtctcgatctcctgacctcgtgatccgcccgcctcggcctcccaaagtgctaggattacaggtgtgagccaacgcgcccggccaccaaatagtgtaatttttacagttacactttgtaactagtgttgctgaagacggaaatgcaattgattttgaaaattgattttttcctcttactgattttttatccatcaaccttgctaaacttatttatcaattctatctgaattttattttagggatgctgcacatgcaataatttcatctgcgaatattaacattaatgtttcttgtagtccttatatatttgttgcttattggactggctacaacttccattgttttattgatgaggattattgagagcaggcatccttgccttgttccccatcttgaaaggaacgctttcaacatttccccattatggtgatgtgttttgcgaaatttttgaagatgtcctttatcagcttctggagttttaaaaaaaatatcaacgggtgttgaatattttgagtgactttgctgcatcaattgagatgaatacattttccccctttaatctgctaatgggtctatatttctccattccatttaaatttttttttaatttgataaatatcttttgctatatgtttcttctcaggtctcccttctcagttatccccctttaccttccattgttggttttctctagtttcttccttttctttttactgtgttctcttcaagctcttgctttttggagttttcccaggatatcaaaggttggggggatggcaacatggttttcagacagtgtgtctccccacaatctgcttctctctacaagcttgtttgaagccaagttaaagcaatggatagaagacggcagcgcgggtgtcagacctgccaatttccaactgcacaccaaatccccgaacatatgcttgaggcccctgcctttcggtttcataaataaaaccctgtcctgactacctccaggattggatggaaactcggatgagtaaatatggtagaacgactttgcaaactagcaccctattcacacgtaaggggttgctcttgtcaccgagactgttagaggcaacgtgagttaacagaaatagcttggattttgaagctaatggaatctagatccattcctaaccagcagtgtgaccttattgtgtaatctttctgaacctgtctccatccatctctacaaagaatgtggcacaatgtaggaactcagtgaattttcgtgattaaaagacgagataatacaggtgcacaatctgcaaaacataaaatactccataaatggaagcagtaaatcttccccgagctcgagactccaaaggccctgagcccagtaccagtaacagcacccaggtaagtaggctggctgagagaagagggctataaagaaaagttctttcctgagctttgaatccccactgtcaggcttcaatggagcgcaaaaattcctaaatttggtgagaaatggcaacattaccagggaatgaacagaccaggccactcacatccacgtgagggctccaggagccacttccgggcccagtcaaccacgaccaggagaggcagcgctggagcctcaatcacgtcgacggaaaacaagtgcgctccctactgcagtcaccaggaggcgctagtcccgcctgtctcccggcacgggtcctcgtttgcgcacgcgtcatttctttcctccagcgtccccgccccttctcctccggccgccaccagtttcgcttggccagttgcgttcgtgcggcgacgtccacgcattttctgacgtagcgagcgacggcggggagccgagcggaagtccagcactattgccgctagaggaggggaggggtgagaagcataagtggcaccggaagtggaattaatccgcctacctctcctgcgcctgcgaaacagaaaagacaaggcgcctgtcgggcggggtgtggcttcgggtggcggagaacgctgcgattggccctcggctgtggcgacagcgacgattggtccctgcgtgcagagcgcggtgagagtgggtggtggccgttggaattcaaaagtggcgggtgtggcgcggggctggtagcggccggagccgtgcgagttctctaccctgcttcgcgagcgggcgagagaacgcgagtcccaggatccccggcacccagttctcttccactgcattcccccggcgcgtgtgggaccgaggtggacatggatccgcaggtgagtaggggcggcgcaggtgtcctgccctggggatggggacgaaggctgaccgctccgatgctgtcgcgcccccggctcccggtcggcctttgtcatgtctaccgggagagcgaaggtccgtgcgcccccgcacaagtggaaaggggcggaggcaggagtggagacggcttagagcacccggggaggtcggaaggcacgtctgtctgccctcccctagcttcaagtttctggagcccctcccttaactttcatgtctccgagatttctcatttcgaattctcaggctcgtctgacacatttccacttctttattcctactcagggtgtgattgcagtgtgtaagaagggagagttctgatatgacttcttccttttggggacatggtgtctgaggccacatccttgctgaggtccttttgtgttaatcgcctctccttatcactgctgcttcggagtgtaggaaagggagaaggagagtagggtaatctgggccaaaagacttctcattctctctctcctttcccaaattgtgcagattcctgcccaatgaaactgattgatttagttctttctcttaaatggtgccctgctgcaccccacaaccatatgcagcttcctgtctccagtgaagagagatgaatgtgtgtgacagctggagtgtacttatctctggtgccaggaaaggtctgcctgaatcctttgtttactagtatttcacgttcaggtttccctgaagttaggattcagccttaagagagattctttctctcgtgacaaccagagagcagagtagtattatgtgacagtaagaagtagtaaaagccttctcagatctattaatcaagtatttattgagcacctactacatgctaggcgtggttgtaggtacttaggatgcagcagtgaacaagggacaaatcgttgccatcgtggagctgccattctatggggatacagacaataaatgtaataaatgaattatataactgccagaaggccgtaagtgctgtggagaaaaggagaaattcaaggttgaggacataggggaggccaactggcgggttagagtattaaatagggtggtctcagtaacccccatggaaaagatgagttgaataaagacttgaaggaagtgagggagacagacaagcagatagtgagggaagaacatttcaggcagagggaatctgctagagcagagtccctaaagagttgtaaggagggaagtgtggctggaatgaagtgagcaaggggaaaagttgtgggaaaggaagtcaggtaatgggtagtggggttgctgatcacagtttgtccttgtgggggtcgttgtgaggacttttactctgagtgagatggggaatcattggatgattttaagcagagagataagatttgttgggtccaccagattttcgtaaccatagcaccattgcctttttttttttttttttttttttgagacaggttctctttctctgttcccaggctggagtgcagtggcatgatcatggctcactggagccttaacttcctgggctcaagtgatcctcccacctcagcctcctgagtagctgggactacaggcagctgccaccatgcctggctgattttttgtatttttaatagagacagggttttgccatgttgcccaggctggtctggaactaactcctgggctcaagcaattcgcctgcctcggcctccgagagtgctgggattacaggcatgagccaccgtgccctgcaacatttttttttttttttttgagaagtagtcacgctctgtcgccagcctggagtgcagtggcgcggtctcggctcactgcaacctccgcctcccgggttcaggcgattctcctgcctcagcctcccgagtagctgggactacaggcgcctgccaccacgcccggctaattttttgtatttttagtatagacagggtttcaccgcgttagcccggatggtctcaatttcctgacctcatgatcctcccacctcggcctcccaaagtgctcggattacaggcatgagccactgcacctggccaacattttttattgtcgtgactaggtggggggttgctactggcatctagtgggtagagggcagggatgctgctaggcatctgacagtgtacaggactgcattggacattgtcaaatgtcaccttggggataaaatcacccccagttgagaaccactggtttatgataatctaggtgccagatgatggtgtcttaggtcagggtgatagcagtggaagaaacagtaaaaagtgattggattctggatatattttgaaggtacaatcagccatgctttgctgacagattagatgtggtatgtaggagaaagagaggactctgggtttttggcttgagcaactgaaagatggagttatatcaattgagatggagaaagctgcaaaaggagcaagttcaaagcagggttggacatcaagaggtcagttattagacttccaaatggagattttttttgatacggagtctctcactctgttgcccaggctggagtgcagtggtgtgatctcagctcactgcaacttctacctcccagcttcaagcaatcctcccacctcaatctcccgagtagctgggattacaggcacgtgccagcacacctggctaatttttgtatttttagtagagacagggttttgccatgttggccaggctggtctcgaactcctgaactcaagtgatccgcccgcctcggcctcccaaagtgctgggattacaggcatgaggcaccactcccagccttaaatagcgatgttgacgatgcagttcagtataggtgcaggatcgaggtctgagctggacatataaatttggaaactgtcagcatatcaatgatatttaaaggcatgggagtggatagtgagtatagatagagaatgctgttaaaatctggagagatgaggaggacctgccagtgaggtaagaaagagtggtctcctggaagctaactgaagaaagcctattaaggaaaagggagtaatcagttgtatcagatgctgtttgatgggtcaagaaaatgaagataaagaattgacttagcaacatgaagttacttgtgatcttgaggatagcaatttcgatggaatggtgggaatgaaagcctgattgcaatgggcttaggagagaaattggccacgatgaatacactagaggtaatactttagagttttgctgcgaaaggcggcaaggaaaaaggatagtacctgttagggaaagcagagttcagattcttttagtttcgaagaaataatagagtttgtggtatgccaattggagtgatgccatagagtacaaagctgatggtgcagaggtgagaagggaggattgctggaggaatgttcctgaaactgggaggatttggcgagtccaggatttggtgaggagggatgggaatgtgatgcatatatgaaagggttgccttaggagcagggccatccacctctgatcttgtggtgaggtggatgtaggcagggttgcatgaatatctgttcttatagaaggttaagtgcttatgcttctcactgtggaaagttggagggcatcattctagctttatattaatagatgggaaaaatatatatactgtggtctttggagttgtcctgaataaacaaacctttaaacacattttctgaaccggcataaattccaaggaggtaggtctgtagcagatccactacggtagtgtagagaggaggaagggcacaggttatttttaaaaattagtgtttgactttggaatacttaaagaaaaatttggtttccatactatatttgattacactaaattaaaataagctttctttgtgcacacttctgtaggtggcaggaaaaatgctacctctttttttccctttttatttttatagaagccaatggtatggatatatcacagtttaagtattgccccactgatgaacattcaatttcattccttcaaaaactgtagagtcctaccatgtagcagacattgtactaggccctctggttatatagttatgaacaaaacagatgaattcttatggtgctcacagtcttatgtaggggttatgataataaaaacaaaagaaaacagtgtatcaggttgtttcatgatttttaaaaataatgatgctctgtgaacttccttgagtaaatctcactgtatcacgggtagctcaaactcactttcccaaaattgaacttagcatccatgaaaccaatcctgctgggtccagtggcatgtgcttgttgtcctaggcacttaagaggctaaggcaggaggagcacttgaactcaaagttcaaagccagcttgggcaaccctgtctcaaaaacaaataaacaaaaaacaactcttcaggtactcagatctctgtgttatttcttttctttttctttttctttcttttcttttctttttttttttttttttttgagacaggatctcaatatgtcgcccaggctggagtgctggagtgcagtggcatgatcacggctcactgcagccttgatctgggcccaagccatcctcccacctcagcctcccttgtagctgggaccacaggcaaatgtcatctggttcgctaaggtggatgtctgcctagcttagccctcaagcttctagaatagcccctttcaactaggttccatgagaattaatttcttttttttttttttgagaccggagtctcgctctgtcacccaggctggagtgcagtggcacaatcttggctcactgcaagctccgcctcccgggttcacgccattctcctgcctcagcctccccaggagctgggactacaggcgcctgccaccacgcccggctaattttttgtattttttagtagagacgggatttcaccgtgttagctaggatggtcttgatctcctgaccttgtgatctgcccgcctcggcctcccaaagtgctgggattataggcataagccaccgcgcctggccaagttcttttttttttttttttttttgagacgtagtctcgctctgtcacccaggctggagtgcagtgttgtgatctcggctcaccgcaacctccaccaatcgttcaagcgattctcctccttggcctcccaagtagctggattacaggcacatgccaccatgcctgggtaatttttgtagaaacagggtttcaccatgttggtcaggctggtcttgaactcctgacctcaagtaatctgcccgcctcagcctcccaaaatgctggaattacaggcataagccaccgtgctcgcccagaattaagttctaatgccctttttttttttttttttttgagacggagtcttactctattgcccaggttggagtgcagtggcgtgatctcggctcaccgcaacctctgcctcccaggttcaggcgattctcctgactcagcctcccgagtagctgggattgcaggcatgtgccaccacacccagctaatttttgtatttttagtagagacgggatttcaccatgttggtcaggctagtctcaaactcctgaccttgtgatctgcccacctctgcctcccaaagtgctgggattacaggcataagccactgcacccggtccaggtgaaacatttcaaacatggctcagtaaatattgcctgattctcccaagcagtcttcaacactcacatatcttccactctctcccttgtttatgattctcagctccagccaaaagggccagttggtttcttagccatgctatgtacatatttgaatttttgccttccaggaagagcatccattcctctctgcttgtttgagtcccacccttaaagttagtcaagtccagcttttcccctagaggttattcccacttttaggttatgtcctcacttctgttcatgctgtctggcacataattcagcttttggcacaagtggtgctcagtgcttggtggtggtgttgacaattgaggctgggggccaagacaggaagttcttgggacatttgggctcctgggtattgtcttaagggtctcttttcccaacagaggtcccccctattggaagtaaaggggaacatagaactgaagagacctctgattaaggccccttcccagctgcctctctcaggaagcagactcaagaggaggcctgaccagatggaagatggcctggagcctgagaaggtgagctgggcatggagagctgtgcatgtgtgtggggggtgtgtgtgtgtgaaagaaaggagagagagagtataaaccattagggagggtgactatggaccttgtctttatctttccccagaaacggacaagaggcctgggtgcaacgaccaaaattaccacatcccacccaagagttccatccctcactacagtgccacagacacaaggccagaccacaggtgggctctcaggatggatagactccaaggacatggaagtccagtgctcttcaactcacttgtttcttttctttcaattttattttattttttttgagacagagtctcgctctatcgcccaggctggagtgcagtggctcaatctcactcactgcaacctcctcctcccaggttcaaacgattctcctacctcagcctcccgagtagctgggattacaggtgcccacaccatgcccagctaatttttgtatttttttcagtagagatggggtttcgccatgttggccaggctggtcttgaactcctgacctcaggtgatccacccgcctctgccttccaaagtgctgggattataggtgtgaggcaccgcacccagcctattttgaataggtaataacatttcatttggttcaaaattccaaaggcacaaaggttgttgtatagtgaagtttgcttcctatttctgtcctccagccacccaattctgctacccagggcaactgtgtgttcttccagggaaattctattggtattcaagcaagtaagactatactcccccaccttttttacataaatggtggcatactttagacatggtcctgcttttacttatcttaatccaaattgctttttggcatatggagtacagttggccctctgtatccgtgggttctgcttctgcagattcaaccaaccatcggttgaaaatattcaaggagagtgggcacagtggctcatgcctgtaatcccagcactttggggggccaaggtgtgtagattacctgaggtccggagttccagaccagcctggccaatatggttgaaaccctgtctctactaaaaatataaaattagccagacgtgatggcccgtgcctgtaatcccagctactctggaggctgaggcaggagaattgcttagaacccaggaggtggaggttgcagtgagccgagattgtgccagcctggcgacagagcgagactcggtctcaaaaaaaaaaatgagaaaatattcatggaaaataaaaaataaaaccaaaaaatacagtataacagttatggtcatgtgtcacttggcaatgcagatacattatcagaaatgcattattgtggaaacatcatagaatgtacttactgaaacctagatgatctagcctgctacacacctaggctatctgcgatagcctattgttcttgggcaacaagcctgtgtggcgtgttactatactgaagcatggtaggtaacataacacagtggtaaccatttgtgtatataaacatacctaaacatagaaaaggtacagttaaaatataatataaatgataaaaaatggcacacctgtacagggtactaaccattaaatggagcatgtttgaatggaagttgctctgggtgagttagtgagtgagtggtgagtgaatgtgaaggcctagggccttactgtacactgctgtagactttagaaacatggtacagttaggctacatcaaatttataaaaaatagttcttttataataaattaaccttagtttactataactattttactttataaacttaacattttttttcccacttgccaaggctgatgtaacattttaatctttttttaacttttttttttcgaccagttgtcaaatgatcctttattgaaatattttcctttgtgcttaactagctgggcattccacagcaccactgttgatgtcatctatgatgtcatgagggtggtggccatcaacattacagcccatagactgggcagtccccggaatctctttaatggttccagagagttctctggctaaggatcggtgccgcatctgtcgagcaatgttgacgatctcatcaaaagtgatattcccattgtgtttaatgtttttctgtttctttctgtctcttggtggtttcttgagggctttgatgatcggggcagaggcagaaggcaccacctcaatctgggcctgtctgttctcaatggtcagtttcactgtaatcctcaggcccttccagtcacccgttgccttggcaatgtcatcaccaaccttttttggagacagacccagggggccgatcttgggggccagggcagaagtggcaccgacttcacctctggtgcacctcaggtatacgaccttgatctcgttggggtcgaacttcggtggcatggtggaggcagctggtgtcggatgaacccagattcaggatgaccgaagaaagttgcaccttggcctcctccgagccgaaagccgagagcttctctctcttttttttttgagatggagtctcgctctgtcgcccaggctggagtgcagtggcacaatctcggctcactgcaagctccgcctcccgggttcccgccattttcctgcctcagccttccgcgtagctgggactacaggcgccctccaccacacttggctaattttgtttttttgtatttttaatagagacagggtttcaccatgttagccaggatggtctcgatctcctgacctcgtgatctgcctgcctcagcttcccaaagtgttgggattacaggcgtgagccactgcgcccggctaactttttgactcttgtaataacaactgaaaacacaaacattgtatagctttacagaaatattttattcctttatatccttattcctcatgctttttttctatctaaattttgttttgggcggggagcatatattcagggcaatatgaatctctgtctcctggcttgaaaataaaatttttgttttttgttttttgtttttgagacagagtctcgctctttcgcccaggctggagtgcaatggcgtgatctcggctcagtgtaacctccgcctcctgggttcaagtgattctcctgcctcagcctcccgagtagctgggactataggtgtgtgccatcatacccagctaattttttgtatttttagtagagatggggtttcaccgtattagtcaggatggtctcgatctcctgacctcgtgatccgcccgcctcagcctcccaaagtgctgggattacagacatgagttactgcgccccgcctgaaattctttttttaatttaaaattttatttatttgtattttttccaagaaataagcttaaatttgaaaaattttaaatattattttgcttttcaaactttttgttaaaaacgaagaaatatacacattagcctaggcctacatagggtcaggatcatcaacatcactggctttcacctccacatcttgtctcactggaagatcttcaggggcagtaacacacatggagatgtgacttcctgtgataacaatgctttcttctggattgcctttttttttttttttgagacggagtctcgcactgtcgcccaggctagagtgcagtggcatgatctcggctcactgcaagctccgtctcctgggttcacaccattctcctgcctcagcctccggagtagctgggactacaggtgcccgccaccacgcctggttaattttgtttttgtatttttaggagagacggggtttcaccgtgttagccaggatggtctcaatctcctgaccccttgatctgcccacctcggcctcccaaagtgctgggattacaggcgtgagccacagtgcctggcctggaatgccttttgaatgacatgcctgaggctgttttatagttaactgtttttgcaaatagaaggagtataccctaaaataacaataaaaagtacagtacggtaaatatataaactagtaacatagtcattatcattattaggtattatgtactatatgtaattatatgtgttatacttttatacaactggcagtgcattaggttcgtttatatcagaatcaccacaaacaggtgaggaatgctatgacattaccatggctataatgtcactaggcaataggaatttttagctccattataatgttacggggctactgttgtatatgcagtctgtcattgaccgaaatgtcattatgggcacatgactgtattaacatagcatttacattgtgttagatattataagtaatctaaagatgatttaaagtatatgcggctggatgtggtggctcacgcctgtaatcccagcactttgggaggctgaggcaggcagatcacctgaggtcaggagtttgagaccagcctggccaacatgctgaaaacctgtctctactaaaaatacaaaaaaaaaaaaattagccaggcgtggtggcgcttgcctgtaatcccagctactcaggaggctgaggcagaagaattgcttgaaccctggaggtggaggttgtagtgagctgagatcgcgccattgcattccagcctgggtgagaagagtgcaactccatctcaaaaaaaaaacaaaatggaggccaaggcaggcagatcaccagaggtcaggagtttgaggccagcctaatcaacatggtgaaaccccgtctttactaaaaatacaaaattagttgggcgtggtggcgcatacctataatcccagctactcgggaggctgaggcgggagaatcgcttgaaccctggaggtagagtttgctgtgagctgagatcatgccattgcacttcagcctggacaacaagtgaaactctgtctcagtcaatcaataaataaagtatatgggagcgtgtgcatagactatatttaatactatatacctatttatgtaagggacttgggcatccttggattttggtattcttggggggtgctggaatcaaccccttttggatactgagggatgactgtaatttctggttctaggggaggtatcattaggagctggccagacttagggataagggaaggaagttatcctatttctaattctgagaaaagcacttcttctgcccctgtcctagcaagtgtacatgccatcttaagaatgatcattctacctttgctctctcccatctcctgggcagctcaaaaagtttccaagaagacaggaccccggtgttccacagctattgccacaggtaactgtgctcaagagctgggtctgagaagggatttggggtatgtgtaaagggagaatgatggaggtggagggacactggtcctgtaattcctaagtcacctcctcaattctgtagggttgaagaaccagaagccagttcctgctgttcctgtccagaagtctggcagtaagtgacaaacataaccactgggtgagaggctgggatagggaagagaagatggtgagtgaccagaaaaatccatttggtctctaaggggaaggagatgtagcatcaggtgtggatcccataaaggctagaagggaggagggatagagagcctagacttcactgacctttgtcctttctgtgttcatcttagcatcaggtgttcctcccatggcaggagggaagaaacccagcaaacgtccagcctgggacttaaagggtcagttatgtgacctaaatgcagaactaaaacggtgccgtgagaggactcaaacgttggaccaagagaaccagcagcttcaggaccagctcagagatgcccagcagcaggtcaaggccctggggacagagcgcacaacactggaggggcatttagccaaggtacaggcccaggctgagcagggccaacaggagctgaagaacttgcgtgcttgtgtcctggagctggaagagcggctgagcacgcaggagggcttggtgcaagagcttcagaaaaaacaggtggaattgcaggaagaacggaggggactgatgtcccaactagaggagaaggaggtaagggccagattttcaccagatgtcagccccgctttcctggcagaggtcatgcctcccctcccttccaggtacccctcaagtctgggctgagaactcctgagcacctatctttagcagtataggtgctgctgaagatacctctctcttgacctgtctgcaccccagcccactcctgactgtcttgctttctgccacgcttcttcctacccttgactgtttgcaaagctctcatttagatctgtgtctttcttagtcctccatccctctttctttgggttcccatcctgatcacaaattcctgtggtactctctttccctcctcccatgtccacttgactccttcctggtgagcaccaactagattaagttatttgcagtctcttaaatgactcaactttcacttctgggcattctgcatatgtgcttccctctttctggaatgttctttgtatactacatccttccttggttcactcctgtacttctgggtgtcaccctagatatcatcttccttgtgctcctctttgtgcttggacatacccatagcactccctgtcttagtaccatgattccttattttctcatctttctttgtttaccagactttgaggtccttttgagcagggacctcacttccacccactccatacgccccacagtttgttcttcttcttggttgcatcttaccctctgtgtatgttgtgttctcttctgggcagaggaggctgcagacatcagaagcagccctgtcaagcagccaagcagaggtggcatctctgcggcaggagactgtggcccaggcagccttactgactgagcgggaagaacgtcttcatgggctagaaatggagcgccggcgactgcacaaccagctgcaggaactcaagggcaacatccgtgtattctgccgggtccgccctgtcctgccgggggagcccactccaccccctggcctcctcctgtttccctctggccctggtgggccctctgatcctccaacccgccttagcctctcccggtctgacgagcggcgtgggaccctgagtggggcaccagctcccccaactcgccatgatttttcctttgaccgggtattcccaccaggaagtggacaggatgaagtgtttgaagagattgccatgcttgtccagtcagccctggatggctatccagtatgcatctttgcctatggccagacaggcagtggcaagaccttcacaatggagggtgggcctgggggagacccccagttggaggggctgatccctcgggccctgcggcacctcttctctgtggctcaggagctgagtggtcagggctggacctacagctttgtagcaagctacgtagagatctacaatgagactgtccgggacctgctggccactggaacccggaagggtcaagggggcgagtgtgagattcgccgtgcagggccagggagtgaggagctcactgtcaccaatgctcgatatgtccctgtctcctgtgagaaagaagtgaggacccatgggcactggaactgggaaatggggaggagtgggcagggtgccacgagatggaggtagagggagaaaggagcaagagagaattgaaggatgaagtgcaagttatcaggctgggttaccacatccggttttggcctgtgggctgtcggtagatctgccttaacctgggagtggcgagggagtgatgcatctgccaaaacgaggagggtcactacatctcatgtctcatcttcttgctcagctcatcctagccatgctggcctcctggctgttcctcaaccagctagtcgtgctccccatctcagggcctttgcctggatgctctttcctggagatcttggctatcctgtcaaaacttgtgttccccaccccgcctttatacactccctattctatgtattccttaccattttcagacatactgtgcatcttattttgtttcttgacaggctagaaagcttcaagagggtgggggtgggctcttattcatttccatacatattactatgtactgacttctgcctgcctttttgccccttctgctcccatccccaggtggacgccctgcttcatctggcccgccagaatcgggctgtggcccgcacagcccagaatgaacggtcatcacgcagccacagtgtattccagctacagatttctggggagcactccagccgaggcctgcagtgtggggcccccctcagtcttgtggacctggccgggagtgagcgacttgaccccggcttagccctcggccccggggagcgggaacgccttcgggaaacacaggccattaacagcagcctgtccacgctggggctggttatcatggccctgagcaacaaggtgggaatgggagtggggtgagatacgggacctgggggacagttggggttggctgtgcagaaccctgcctattcctaaacatctgtccccacctcaatcatctaggagtcccacgtgccttaccggaacagcaaactgacctacctgctgcagaactctctgggtggtagtgctaagatgtgagtgaaagggacagatggaaggggtcaggtaggaactgtgttggggtgaggggtagaaaggggaacagtggagacctgtccaggctctgctggcccctaatgctggggttgggcacattgtcttttcataggctcatgtttgtgaacatttctccactggaagagaacgtctccgagtccctcaactctctacgctttgcctccaaggtgcgattaccacccgtcagccttgtcaggacccgtgggtggttgtaggcttctccattccaatcccttttgtcttctagggcagggagcacatttgtgcagaaaggttttgcaggtatctgaggcactgctcacctggttccatttttaattattagcttttgagttaagttttttaaaaaacgggtgattaatttaacctgagaaagctgattaaaaaaaaaagaaaaggtgactaaaaggtctaaactggttgggcgcagtagctcatgcctataatccgaacacttcgggaggccaaggcaggaggattgcttgagcccaggagtttaaaatcagtctgggcaacatagtgagaccctgtctctacaaaaaataggaaaattagctgggtgtaatggctcacacctgtagttccagctactcaggaggctgaggtgggaggatcacctgaacctgggaggtggaggctgcagtgagccgtgatcctaccactgcacttcagcctgggtgacagagtaagaccttgtctcaaaaaaccaacacacaaaaaatccctaagattcctccctatcagcatacagagatcattatttttaggtctgcctagactccactatgtagctgcaccaaaatttatccaccagttccctctactggacacttggattgtttccacacttttttagtcacaaacaaggccacgttgactaactttgtacatacatcattttgtatttttcagttacatctaactagggaaatagtccttgaaatgggattactggatcaaagacttagaggtttttcagactattccaaatagtgtgaattcagactccaaacctcatgagggtcagccagtggctatatgaattctcactaatgagaattccttccactagaatctccttccactagtgttaagcaagtcagaaagtttccttactgtctgcctccacagtaatttttttctctggtacaccctcctcctgcgcgtatagccctttgatgggctctggctttatttgaggtctgatcaggtctgtcctgctgtgcgcttgggcctcctcccagtcagcactgattgttgctgtggagtagccagcacctgcaccctgatctggtattctactttgatgagggtttccctcactatcttgcaagttcaattttagagggtggtgatgttttttctaactttttattaatgttataccaatgtaacatccaacaacatgaactttaatatcctctaatacccagtttatgttaaatttcacccaactgtctcagaagtgtcttttatacataataggtttgttcaaatcaggatccaggcaagggccacccacttggttgaaatgtctcaagttccacaaccctatcccacactgccactattatgtcgtttgttgaaggtcatttgtcctatagaatatactattctggattttggctggttgcttcctctttcccccatactttcacttatttatcatatttgggtgttgtcaacctgacccatccatttacaagctccttattgactttttcacctagtgattttatccagcagtgaccatacctggatctttatttcattaaggggtttctaaatggggatttttctaatcttagttgttctgcattggttagtcacgattcttttatgaagacatttgccttgccatctacttggtttctctgaaattcaattcatacaggaaaaacaagataaatgctgaattatttattgattttcagtattgagttgatatcctagcagcttccaaaggtgaccaatgaatgtttatctgagggttatttttatttttattttttttgagacagggacttgctctgttgcccagactggaattcagtggctcaatcatagctcattgtagccaccaaaagtgttgggattataggcgtgagccacccagcccggccacagtcgttcttctttctgatgctcaaattgccccatctttagccaataggaacctcctggccgggcgcggtggctcatgcctgtaaccccagcactttgggaggctgaggtgggtggatcacgaggtcaggagatcgagaccatcctaacacggtgaaaccccgtctctactaaaaatacaaaaaattcaccgggcgtggtggcgggcgcctgtagtctcagctactttgggagtctgaggcagaatggcttgaacccgggaggtggagcttgcagtgagccgagatcgcgccactgcactccagcctgggcgacagagcaagactccgtctcaacaacaacaacaaaaaaaagagcctccttcagattggtgccagtgtcctttagacagaactctagtagtcttttcagattcaacttgtacatttccttccccagacttcaactgatccattttctaaggagtcctagttcctaaatgggtgttattactattttatctcggtttaagtgttttacagtgggagaggttggaggtctctagtacagggtattgctggaaatgaaagcctcctttctctgctcctgtattttcttctggggcttccatctcttctcaagccttttcacctcctccaaacctagtgtgcagaggagaacaaaccataactggcaccagcctgaaccagcctttggaggccttatttcggtatttctgagggcagccctagcattggaggatgggagatcttgggaaaaatgttgtattggttacgctgcaaacttttatcctgtctaaccccctgcccccaggtgaaccagtgtgttattggtactgctcaggccaacaggaagtgaagacggatccagatctgtgtgtgtgtgtgtgtgtgtgtgtgtgtgtgtgtgtgtgtgtgtgtgtccctatgtctatgtatcgggtgaggggtgggagggttgctggagggtgctttattgggtggagggcaccatgtcccagggctatcaaataaagaatagtttggttttttttttaaataaaggttttattagcatttgcccaagaaggcagatactttcatatctgtaaaagtgggagctgtgatctgtaccctctgccaaacgtttacgtgggaggcgggagcgggggctgagggcttcgtcttttctcccctctgctatcaccggttctggaccttggcctggatcatcttcccctctgctaataccccctaccccgtccgtcacatcagggaggtgtgccctctagctatccacgccccctccttggtcactagttataggtaactttcacccttccgccggccaccccagccccagggaagaacgttcctttggtgggtgtcggcaaatggggaccggaccccagagtccagaggcggggctagcgcgcgctcccaaactgttggctctttcctcccgtcccgccctttccctgcctttccgttcgaacggctggggctctgcccgctcgctgcccattggctggctctcggtggcgtcaccgccttgggtcctcgcgcccttcgtctgcgccagccctggaagcacggggcgggacgtccacgggaagcggcgcgcacgcccgccgactccctcgcgccaaccgccgacggccgccgcccggtgaaggaggggctcagtcctcccaggtgccgcgcgcaggaggggacacgcgtgcgcaaaagggcggtgggtggggcgcgactcgtcacggggagggcggggcgcgcgagggaggagggcgtggtgggggcatcgagaagggtgaatggagggcggggctgtgaactggggccggggggcgggacttggagtgaccatggggggtggggcagctaacggatgtggcatggggcgggggaccaggccggaggcgggctgccgggaggggggattccctcgtgccccaagggcgaatctcaggtcggaggaaggggctgaggggattccctctcccaccgggtccgactcttcgctccccaagccgcggagggccagcctcttcttcggcgccctccaggcctgttggaggtgagggaggtggggtgaggtggtgcccgcccccccctccggctcctcctttcccccagtcctcccctcccaccaccctcccccccaaccggtccgtccctcccctccctccctcccccccgccgcctcctcctcctgccgctgccgctgctttggctgctgcgtcatacgccccagagccgccgggacggaggggctgggcctggggaccccccggcctccgcctgcacgcccccccacgcccggacgtgccctctccgcgcgggggactcgcctaggtctcctacgtctgcccctgcccggctcccggcggccccagctgtcaccggtaaggaggcggcaggaggcgctggtggggggcagggagccgggggtcggcgcggggcgcgggcgggagagcctcgccgccttggcctcgggtccgggctgggccgacacaagtcccttctcggacttgccgtcctggggagtagagaccgggactgggacacgcccccctcccggggcactcagagaagttgtctaacccgggggcagggagccccgaatttgagggtgacctgacataacctggcaccaggatgattgttcttaatgagacgcgcaggcctggggagacagccgtttctgctctggaaaacatctccagaaaaggtcccaaaacacgtctctgggcaacaggacaccctaattatgatacctctaaactgagtagcctttgcttctacaaccataatttctcctaaaatttcaaggccagtatataatatcccaggagagctctggaagctgggaaactagcaactaggtttggggtcggggggagggctgttagttaccgagaggagagccagtcactagagttggaagaggactcaaaaagctggtgatgggtgcccagtggtttcctatcaaggtgtctcagggatttggagatgggggcacagatacttcattcttgatggcaaaataggcaaagaaaatggggaggctggccgggcccggtggctcacgcctgtaatcccagcactttgggaagctgaggtgggtggatcatgaggtcaggagttcgagaccagtttggccaacatggccaacacctcatctctactaaaaatacaaaaattagccaggcatggtggcatgcgcctgtaatcccacctacttgggagactgaggcaggagaattgcctgaacccgggaggtggaggttgcagtgagccaagattgtgccactgcactctggcctgggcgacagagcaaaactccatctcaggaaaaaaaaaaaaaaaagaaaaagaaaatggggaaggtttctcagcattcataaccttctcctccccatttcttttctggctaggcccccccaggatgcaatggcgcagcccccccggctgagccgctctggtgcctcctcactttgggacccagcttctcctgctcccacctctggccccaggcctcggctttgggagggtcaagatgtgctggccagatggactgatgggctgctatacttgggtaccatcaaaaaggtaagaccttctacctctgaccttcttcctagttcccttatctaattctggttcccatttcatcctgtttgctcacccattccaggtggacagtgctagggaggtgtgtctggtccagtttgaggatgattcgcagtttctggttctatggaaagacattagccctggtaagactctagagacctgagattgcacatcccatggaaaacaaacctggcctagaggggcagaaagagacttaaaggcaggccctgtgacactgtgttctctcacagctgccctccctggagaggaactcctctgttgtgtctgtcgctctgagactgtggtccctgggaaccggctggtcagctgtgagaagtgtcgccatggtgagagggcaggtcacctgaatggtccagcttgctcttccctccaggatggtctctatatcacctgtcctggccttagtccccaagccactgctctggccaggctgcttagccttatcttagtcctcatccgctttcagcccagggagaagcagccatggaaaggggtggtataacctttgcaggcagaagatggtttaaatgcatccttttctaaccatatgacctcggacaagtcccttaacctctaggagcctcagttccctgacttgtaaaataaggataatgcaccccctcatcaagaccatggtcagggattaaatgagatgggtaaagactattcctgtcccaataccaagcacacacaggtatgcaataagtggtctactattatcactgcagcttatcaccaggactgccatgttcccagggctccagcccctggagagggagagggcacatcctgggtatgccgccagtgtgtctttgcgatcgccaccaaggtaaaggcacttccctgttacccttcctgtgggagcctcccatccacagcctctcccaagccttttcctctccccacccctctgaagccacccacctgtcctgtctctgcagaggggaggtgccctgaagaagggcccctatgcccgggccatgctgggtatgaagctttctctgccatatggactgaaggggctggactgggatgctggacatctgagcaaccgacagcagagttactgttactgtggtggccctggggagtgagtaatgagaggggagcagactgtggaatgaatgatgtggtggtggatcccaggaaatgaaggaaaaagaacaggatgagggtagcactcagggggataggaggtaagtttagggtttgggacagttatggggaagggggtttctggaggccagaagtcctgtgttccccctcaggtggaacctgaaaatgctgcagtgccggagctgcctgcagtggttccatgaggcctgcacccagtgtctgagcaagcccctcctctatggggacaggtgagaccaaggcagactctctaggagccaaggatgccctctttcttcgtgttccaccctcagttctcccacgcccttctccactccagtctcttcccaacctctgcagcgttacctcacctgtttgccccgtccttgcttgtgagtcttccaggggatggcacagttttcctgtgtaagtgtgtttgctccctcttgcccatgtccaggttctatgaatttgaatgctgtgtgtgtcgcgggggccctgagaaagtccggagactacagcttcgctggtgagctggattgggcatgacctcagtgtaactccacaccacagtatttcactctatatgccccaacctcccacctcaggactcccctggctcttaaaatgcctctgtggtcttgaaaactttgtttttccagggtggatgtggcccatcttgtcctgtatcacctcagtgtttgctgtaagaagaaatactttgattttgatcgtgagatcctccccttcacttctgagaattgggacagtttgctcctgggggaggtaaggggtagtgcagttttgggggttgggatgggacagggagatgtagcggaaaggggaagagaagaaatcactgctcccctggccccatttttcttcatttctcccagctttcagacacccccaaaggagaacgttcttccaagctcctctctgctcttaacagccacaaggaccggtgagttggagggaagaggaggcaaggatgaggctcggaaagagatggagagtggaagcctggaaggggaggggcttgcaacccacctggaagactgtgactgaaaaggattgaggaatggcgtaaggaggaaccgttttttacagcactgaccctatatcatttctcttcttgccccagtttcatttcagggagagagattaagaagaggaaatgtttgtttggtctccatgctcggatgcctccccctgtggagccccctactggagatggagcactcaccaggtcactggtccaggggggatgggggaaattctcagggtgttagtcctggggggtatatgtatagagatggggaggtcttgggggtgtccgggagggggctggggggataaggaggcctcttacagcttcccttcagggcagggccctgggggaggggtctcacgtcccctggggaagcgccggaggccggagccagagcccctgaggaggaggcagaaggggaaagtggaggagctggggccaccctcagcagtgcgcaatcagcccgagccccaggagcagagggagcgggctcatctgcagagggcactgcaggtactggagcagggggaaccctatggagcaaatggtggggtgtgggaaggagtcaaggattatctctcagtcctttgccccctcttctaggcctcagtgtctccaccatcccccagccctaaccagagttaccagggcagcagcggctacaacttccggcccacagatgcccgctgcctgcccaggtcagtgctcctctgcccctcccccacaaaatatgctcccaattattcacatcttctggactttatcacccagaattcttttccctctcccccttggctacccacttcttggcctagaccgacttctagaactagtgtctggtagccagtattctggggaagggagtcccttgggggtagtgtttgagctctgcacttcccagggggagaaggtcctgttcccctgcttcaggtcctgactttccccactccaaccccagcagccccatccggatgtttgcttccttccacccttctgccagcaccgcagggacctctggggacagtggacccccagacaggtgagattctgtcttctattaccagtgatgctcttcttcccctctatgtgctcaaggctcttagtctctaacactgtttctctgattcacatgtgctctccatttctgcccatttcttacaattgccttctctccctaggtcacccctggaacttcacattggtttccccacagacatccctaaaagtgccccccactcgatgactgcctcatcttcctcagtttcatccccatccccaggtcttcctagacgctcagcacccccttctcccctgtgccgtagtttgtctcctgggactgggggaggagtccgaggtggggttggttacctgtcccgaggggaccctgtccgggtccttgctcggagagtacggcctgatggctctgtgcagtacctggttgagtggggaggagggggcatcttctgaacagcctgcctctgcccagctccccattcacacacaccggcactttcataccctgacctctgacctcacctacagctgggatgtacctggagagatagggggtagttctccctactgcccaggctggaatccaagagtggggagtggggaagaggccctcttctctaccctccttcatgattcctgacccctcccatccttcccatttcctttgatgttattttgttacagctttttaaatattttttaaaattatttaacccctgggggcagagactgaggagggaggatgataagggatcccggactctgtatgattgaaataaagagaaataaacaaatctagcagctctgagtcattctgaaagatgtagagaatacagggactagaagcacttatattctcccaacaaatttgcatacatgacaaaaaacaggcaaaaggcagagagacccaaagacgggatttattgggggcccagtcatcacctggaagtcagaaggcgttgaagtatcgcggggatcttcatgatgagcaggaacagggctcatcatggcaggactgtgatagagtcagaaactgactctgtgacctggcgcacccactgcaggtacggaaagttcccctgttccacaggcaatgcaattacctcggccacttcgtaagggtgcacagaactacaaaataggtgggtgggggaaggggatcactcaaagatttacccaaaagaacccactcccttacacgcaagccctagactgcccagcaagtcacacccacacagtacacaccctcaccccatccatctcaaagttctcaccgaacaaaatctgtcaaagctgggaccaaggaactttgggttttaatcatctaagggacaaagataaacatggttgaatcaaggagtgggattgagttcagtttctcagaagaggggtaagggctaaaggggtcagggattggggatattttgttgggtgggggaaatgtttctcaccatcagcacctcactgtcttcctcgatcttccctttccactcatagctgaaaggtcagagggggagagttgtggggagcaaagaatttcccccaggaaagaggttcccagtcagctcctacagttaggttaaccccccaactcctatgactcacatggatgtaatctgagggatgaggttgacgcaggctgctaggcgcttctccaccacggccctggagtgaagagacagtcccattcagagtaccccataaccccagtttttgtactggcagcccagagacaggcttccagagctggagaaaggagaaagcagcactcttctgccccacccccaactgtcccttcatgatcatcctttctcgctgcacatcgaggtccctacctggcgatctccttggcgaccttctcgttggggcaagtaacaaaggctgcagagaccgagcccggaacgtagccagagccggaatccgaggccggcgagggctgggtcggagggcttccagaggccatggtcagcaagactcggggtagcaacaaaaggcgggaggccacaggcagcagcgccggcatccaaacaaaagacaggagcagagaggcctgagagcaggaggcgaattcgatctctcctcacaaacagcccaggaaattacacccggggaagccttcgcttagatcctcaggctctgccctccctctgatgcacccccgaagaatgcccctgaaggtgagagagaaacttggaaaataaagcaaaagctcatttcactcacacctcagggggccaacctctgggatttagggtgcgggtagcggtcgaggcttcgaggaccggaaggggcggggcggggccggtcactcaccactccgccgagcaggaccgcgggagcccgccccccactcatgcggcctacgctggtacaggagagttgatctcaaaggccacacgtcacacggagaaacaaccccaggaagagcggcctcttcttacctgggtggcagccacgtgattagaaaacagcgcgcaccatgtgacagtagaagaaggaccacctgcgcctccagagccagccaatcccgaccctatcatggcgcggtttgcccacctcctgatgaaggaggagccatgggagacttgaccaatcgactaccgcatctgcagacgtgcgcggaaatggcacgcccgtttccgtgtgaacccgaaactgccacttgctggctgaggagagccgctgcggcgttccactgtcacgtgagggggccggtcctcttcggcggcggcactcagtgagtgacgccaagtggccaatcacaggccagcctcgcaggccacgtgaggcgagagctggttccaggaaaggggggccagagaccccgcagagtcgatgcgtcaggctgtggagtggggaatcatccttaaaccccacaatgtgcctagtgacctcccctgcactgtttccgaggtcttaaggagtgggagggtctgagaaggacccttcaccccaaactcaggggttaagagagcgccccctgcccttttagttgggcagagatatgcctgggtttgggaatgaacaacggtgatctagaagcccgctgtccctgggtagcagggagtgattaggcaggcacgggcatggcaagacaatagctagctgaggaaagaagcattttaaaacagagcgagaccctgtggtagaggatggtgaaaatggggcctagccatcttaattgaaaacccaaagcttgagacagactactgaatcagagggaaggagaacgagggctgcaggatggggacagtggtgatggtccttctgtcccctcttccctgcctattccactccccaggattggtccacctctcagcctcgggtctcctttccctaacccatcccccaaggagccaggacctgccctacataacttccctggggcccaagcacatcctgtgacccaaaaatggagagaggggccaatgagaggcagagaggtgggaggaggtgcagagaaaaaagctcttgccactgcccccacccaatatttcccctcccttcaaggtctgaggtcattggtctggtggtggggatgcctcggagtttcccaggctgacgtcagggttatacctctcggaggttctagggcagggaagtggggaggggaggttccctgagatctctgtctttgagtttggagtttgtctctgagacagatttcggaggggtctttcagtatttgtgtggagatctttcttaggattgagtttccttttatgcttctggtttggggggtttctatgtttcagggtctgtggtcgcactctgaggtctttcgaagtcttcttcatgaattttgggtctctgagttgtccatctccggaccagctgaagtctctatctccccttaagtcaggagtgtctctgtctctaagttatcagtctctgagatctgagtctggggtctctttctaggtctgagttctctaagctctaattctacatctggctctttctgaatctgggcctcatctttttctgagtctaggtctcaggtcctggtccctgaaatcatcatctcagggtctggagtctaagatatctgtaggtatggagaaccctttttagactggattttcagattttgatattgagcttctctctctgggggatctggggtcgttttttcctcaaatcaggagtctcttttcctctagattttggccctgtgtctcaaattaccccacagtggggggtggtgaagtatctttctctgtgggtctagggtctctctgtctcagggtctggggtctgcatctttaggacctctgtctctctctggtgtgtttttgagtcaggggtctctctctctctcacaatctgggcctcccggagtaggggtgggggctgcagagtctctccctcctcctcctcctcctgctctcttcgctctcgctcgctcccccgccccccctctctctcggctgccgctgctgccgttggctcttattctcctcctcctcctcctctctcctcctctctgcttctctctgctcctctctcctcctctctcctcctcctcctcctccacctcctcctccttctccccctctttctccccctctttctctcttctttctcccccgtccccccgccccctccccccaggcctgatgagcaggtctcgagcctccatccatcgggggagcatccccgcgatgtcctatgcccccttcagaggtacgtggtggggggagggggagggccatatggggggcaacagggggaggggcagggggcgggggagagtcggggccgagggaagggagcggctgaaatggagggagaggggaggaccgggaaggcaggggtgggagcaaccgggaaggagggattggaggccagagggataggggtagataagggatggaggggccaggaaatgggccttgaaagggggctgaagggaaaatgatgaaggggaaagaaagcgccagaaaggggtgggaaggtagaaggattgggttggggaaaaagctgcagaaataatttgggggtgggagctgagtgatgaggaaaacatcaaggaaatagagggacagagtcttgggagaggggctaggaaggagaaatgaaaacataggggtgaaaagagaagccaagaagatgtggggggataatttggtgggggactcagagtatggtaaggggcggaaaaagagaggaggatggagggagagaaggggccagatggagagagagggaggcagtggggggtggggggatggagggtccagatggagggaagagagaagagagagggaacggtgggggaggggagaccagggcagggggagggccaaattatgtgtgcttgggggggtggcagtacaagtaagatgaaatgatgggagtaggggacaggttaggatcctgccccagactctgaccctcttaaaggctcttgaccagtaaaatgtaacctctggggtcttaatgctgtcttcacttcatcacttttacccccttcccccacccctccaatccttatttccattccccctccctcctctgctgtccatcacctatatctttccccccatatggtgtccgttccttatatgagtcccccttctgtccttcccctatatcagtcccctctctggtgttcattgcctctctcttatctcttttctatgtggtcgctcccttatatctctatcacttctttactagtccgtcttgaccccttctcatagcctccgcattaggtctgcctcctttgctctgacacatgtccagtcgagcccttcaggtgtattcccttgcccctgggcatttaccatcatttctgcctccttttctatctactcctattatttgtctcccagaccattccttgtcaccacaagtctgtgcctacccactttcccttaatacctcaactcttattatcatttctcttttcttgtctcctctacttattggggtgttggagatttggggtacaaagacacaggttttgatgattagaacaagggatccccatctcagcccttgagggatttctcatcctagtaaaaatttcccgtttctcagccatgttgctctgcctcttgcatctgcctcccagaatcattcttcaccaagtccagacagtatgtgtgtgtgtgtttctagagttgttcctaagttccctgctgccaggagaaagatgccctctgaagtctaacccgcctcccttggctgcagcctgaaccagccctttccccaaatgcttatgtgtatcaacagatttctcctctgggtataccaagtgtctaagtgcggtgggcatgttgcctgcaatgtctgtagtttcagaggctaggtattggtgatctctgtatctagagaacattagttagtctctgagatgggttgagatagagtttcaaagtatgtggtttctaaatggtggacattctgagggttcatcgctcactgtgatctggaggttgggtaaatttgagagacatatttatagacagaaaagggctgaatttgcaaaactctgctactcagtgcattctgttggaatgaagctcaaagaccagttctcctgcagtatactcatggttatcccataaaggtgacagagtttgatcttttttccatctaaaatctgataccttaagcctaatttctagctctttgctgtcgccaatgtgacatctctcttacttcaatagggcctgtgtggcattggggtttaaaggagaggcagtttgcagggagagcggcatggcaagaacaacagagctggggaaggaggaccctggtctcatctcagccataggcgacacttggtctactgttctctcttctcaaagttttgttcccatctccagctcttgtctttggaggcccctctgtgtcaccaggcctggatattccattctttccccctgacatctttcttcctcaagctcctcactgtgccttgagaaggctcctgacctatggagtggcttccatcctgtccactgagactaggtggggtgaggtggtgggggcagtgttgaatctctgggcactgaatgggagaagagataaatttggtctctacttgtccaaacaagggcatatttcccaccttctgccctggggcctccacagccagatgccgacaaaagccatcttctccttaccaccagaagaaccagaactttccctaaaggatgagcagggttgaactaggggaggagggcacagaggagggaagagttgggaggggaggccctctcatgtctctgactgtgaacaggtaagctccccgacttcttcttttctagatatttagccctcagaatctcatgatcccaatgttcctacacacacaccccatccttctttcccacagccatgtagctttcctcatactcttttatagaggggtggtgccaccttccaagtccttgtcttctgcagctatttggatgccttcctctacccagatatctgacaccaacttctctgtttttctcctgccaattttgcggcacctctaccttattttcctgaagtagatggagagctccttcatctttctctgcccccaaacgtgtaccttctctgtcatataattcccatccctgaacctctgcatttcttcccccaagtctccagagccttctgtgatgtgatcctctcctcttttcccctttgtataaatgcttgtcttgtgttcctttagagttgccaggtgtctcactttcaactgtgatctcctgaaggccggtagggtccccttctcactttgtggactctcttcttgccattttaggcctctgcttccaaatgcatagagcctcccttactgtttctgtgtgtctctgtcctccagatgtacggggaccctctatgcaccgaacccaatacgttcattccccgtatgatcgtcctggttggaaccctcggttctgcatcatctcggggaaccagctgctcatgctggatgaggatgaggtgagtgtggtgagaaggctgggaaaacgcatgtgggagaatggggagagtcctcattagtgaaggggagagagacacaaagaaggcagacaaagaagaaacatttgcaaatggcaggagggtggccattgagacttgggttggagtgtgacaagaggggtagtcattctctcatcttgggcagggagtctttgagggttatgagctgtgttggggaggagatgtggttctgaagatttcgggggtggggaggctcctgttttcacactgtccatattgtaggataggttagaatggggaaggggaactgaagggtttggagaaggggtgaagacatggaaggccctcccaaccaaagcaatcctcaggacccctctctgctttgcccactgagcaagactcccagtcctttctccatcagggggcagagtgcaagaagagaaattgcaggacgcagagaaaaggcaggggatagaggaggttttaggtagctggaggatactgggaaagaagactgaggtcagtggatcttggcatgatggggtgaagactgggagagtgattgagatcaaggtttagagagacactgagagggcttctgcaagggagtggttggacatcaggaaggaatataagggaggggaactgggagtatgtggagttatctaaaggagtacaagtggagtaggggcagggactagccagagtaaaggagatgaaacggacagaggcctcttatgggaggtggtggccaggtatggagatctgagagccagggaagtgtgggttctgatttgggagctgggtcagcaggagtgtccattggaggaaatagaggataaaaactggaatggtgccccacaagtgtgagtcagggaatgggggtgatttgggggacaagctttaaaaaatggtagggtagcctggaaaaccaaacgtggtgagagatggaccctgaaagttattgggaatggtgtgatgaggaagggttagaatttgagtcagggctaactagagtgtcaagggacctatgggggcaggtgagagtgtggagagatggctgggtagacagcttccaggccacagagtaaagtagaggtgttaaggagaggatatggtgactttgaaaggagaggtggcttggggagtctaagttttggacaccattgggagacatttgagtgactgtggtcaaacccctagatcaaggtttggagtctgtaggagaaatgggggaaactggaacccagagtggggactgttatagggatgaagagggaagacaatggattggggtaatgaaggaatgacagagatagggacagactgaagggaccagtggccagcaagttgaggggcaataggaatggccggtctggagcaggaagggcgtgtgtgtgggaggaggagtagatagaattgggaaaatgagcagcctgaacagacgcagggagttggaattggatgggtggtggaactggggctgggggatagtgaggggtctgttcctgtggctctttgtagaggtggaggagactgcaggggtggaggtgtatggaggtagggatggaggtggacagggggagctgggtgtgaagcttagggaaaggtgatggctgaggggaagaagggaactgagagatgctgggtcgggtgatggaaggagatgaaaggtgggggaaggtgaccaggccctctggcgggaggggaggttgggtcccagtctggccgcaagccgggccgtgggagggagacaagctgtggatcctgattataaatgcagcttctgctacccccgtgacaggctcggagggagagaagggggtaagggaggtgggaggttgggaggaaagcagggagaatggaggaactgaaggtcaagggaaaactggattcaggaagtagctaacttctgaggagttgcagaagagctgagtagggtttgggagaattctccggaaggtgtttcaagacaaatggagggagaaaagagggtgggacggcaaagaatgagagagagagactgggggagagaagggagagatccagtcaccaagtgtggaggggccggggcagaaaaagtgggcaggcttagggggaaaaggaggcccgcccttcctgggaggaggcggaggggggaagagggaggggaggggcggcgtgggccagggaggtctgacacacccccacctcccctagatacaccccctactgatccgggaccggaggagcgagtccagtcgcaacaaactgctgagacgcacagtctccgtgccggtggaggggcggccccacggcgagcatggtacggcggccgagcaggctctcatgacccggacaggcgcggggagagggctgaagatggaccgggctggcggggcgggggcgtcggggagcggcgggagctggccgggggcgggagaaggcggagacaaagtcttgcttcccgaggggagatggcgccctcctctggaaggtggagcgggacaggggctgtgggtgagaggcccctgtgggtcctcgctcggcttcgctccctttctcctctccagcagtgaagtttgactattttcctggtgcttgtaaaaatagtctccttagatctttagcttccagtccgtgtgttcctgcccctgcccctcccagcccctggtctgggatcttggaaagaatgacctagttcctgccctccccccagacctcttccccacccctatgctcctgattcttcttccggaccttcagtccttgaggtctccttttattaccccctgttttctcctctcatcagctgcttctattttctgcaattgtatcaccctttctctttcctccctgatttctcttattttctgtacccctcttgattaccccgtccctcccctctgctcccggcgaaagtccatcagactcccatctcatctcctttctgtctgtagagctatctgcgcggtctgtctctccaactctctccctctctccatctgtctcttcccctccctccccctttctgcccccccaaccccctctttagtcatttaaaaaaagatttttgtcttcctgagaagttcgcttaaaaggtttccatgggaacagtgaggggagatgaaggcagagaacagagatctgcagccaaggtgcagagagacgccctcagcccccggaaaccccctcgtcactgcccccttccacttcatttcccttcccggacctagcgatccaggttccccattcctccaacccccaggtgacccctttttcccaccagctccccctcccttcaggaattcaagctaccagtttctctcccttagagagccagtgacctgtccccatcctttggctccttccagccttctgataggtccaggccctactagccttgtgggccggtttggggaccttgggtgggtgggtgggtggtcagggatgtgtgtcattgtcatggaaaccccataccatcggggtgtgtgggtagcacatctctgtgaggcaaagtcaggtggtggtggagtgtatacagagaatgtgtgtgatgtctgtcacatctgtgtgtatatgtatatgtgtgtatgtcatgttcatgtctggggaagatgtgtgtgtttgtgtgcatgtgtgtacacctgcgtttccaggccagaatggtcacatgctcacagagcatgtttatcatgtgtcctgtggttggcagatctgcccacttattccccatctttctccttatcctgagtcctcagggtctaggggtctctggcgggggtctcccgtgtgttttgggtggggacaccgtgtgtgtttggagttgaggtggcatgtggaggttgctgtattggggttcagtaggggctgggaggggttccaggggcatatgtatttggggggagggcttagtgaaagttgatgggggtgaacgtttagggtcttcaggcagacatggaatgtgtaaagggcatggaggatgtgcagtggacataggggtcgttgggaccttggggacttggcaatgccaaggtgtttgctgaggctgtggactctccagcccgggagaggtcgccggacctttgaggggcattggaatcctgggctcctcctctgctgggtggagccgcgaaccctcgttctctccgcggttttgtgtgtgtgggggggtcctgctcaggaggggatggtgggtggcctggtttgttttgggggtccccttgcccccctcccccgtctctctcgcgctgtctccgggcgacagggctcgtgacagaggcggccacggcagcagcggtcgcctagcaacggcggcggggcccgggcaacggcggcagcggcgggagcggcggcggagggagccgttcccgcggccgtcaccgcgcggccgtcccggccgtcccgggccccgccgccgcccccaccgcgccgggcggcgcgagccgggccgtaccgccccctctccctccgcaccccgcccttcccccgcgcaggggcggggcccctcccccaccggggacacccctggcccccccggggggcggtgcgaggtaagggcggggccgggcggactaggagcgcgcgtagaggggggggcgccgcgcgcgtggggcgggggcgcgcgtgtgcgtgggcgcggggaggggggtggggaagccgcggtggcggcggcggcggcggcagctgctccctccgcatgttctcgctgcatcttccgagtggggggagttatggtaaccggagggggacagcggaggacgggagggtcggggaccggcctcgtgcggacagggtcttgagcacgcgggggcggccggtgtgtgtgggatcttggagcccctggtggaaggggcagcccgtgtgtccgcgtgtgtgttcgtgcccatgctcgtgtctcctgtgtgtcggtgccatgtgcacacgggggcccagttcctcgtgcacacatgtgcagccatccttgtgcaagtgtgtcctgtcttatcttgcctctgcctgtttcctgcctagggggctgttgggccagccacgggcttgtggggcagtccgcggccttgctggtccatgtcacctctgaccctgagcatgcatatccctggctggggctcacctcctgtcaggcttctgtgtgtgggaatgtgtggccctatgagcaggattttctgtgtccctggtggcaggtgtgtgtctttgcatgtgtgttccagcactggcctgagtatctgtgtcaatcccagcatgggtgtccagggcgtgtctggatgtgggtggtgtggctggggggagtaagtgtgtgaatgtgttccttggaattctactgtgtatgaaacacctttgggctgggcaggtgtaagccctgcttggtcagtaagtggggacagaaaagcttaaaaagggaagaaatggggtaaagaggaaaagtggggaggggataggagagaaggaatgagagaggcttgaagaagagagcagagagcagcaggccagggagaaagaatagctggagaatgggaatgtgggagaaagccaagccagacttagaagagagaacaggggataagagcttaagatggggaactggatagagatggtgggagaagaaggggtctgggagctggggaggcagtggggaggagagagtcaggccttctggtaaagtgatctctgaaagaagaaagggaagaagatgggagaaggcactggattcttgtaggccttgcaggatcaggcttggttttggatcagggaaggccactcaggcatacgggctggctcacagtgaggcctgtcatagcagggactgtcattagaggttcatatccccagcacagagctctgtctcccatttctctgctctgtgtccaaccctgttcttcgcccttctctggcaacctccctcctctggctccccttgagagctgccagctgggtgtggagaggaagaaaggccaaagggaaggttagggatttggagggcagggggagattctgtgggtgatggcaagattagagatgttggaggggcaggagtccaagcccttgctgtgtgtgtgtgagtgccattgtgtgtgtacacagggtgtgtacatgtgtgggtgtgtgcacaatgcctgtgttacgggtttgtgtaggtggctgttatgtgtgtgcatgcgtgtatacatcgtgcaggcatgggacatggagacccaggatcacagtttgtgcttttcaggtttgctgtgtgtgtgtgtacacgggtgtgtgttgttttctctgtacatgtcactgcatgcagcattaataacaggatgttctgtgtttctgtcactctgccccccctttcctctgtgtttctgctattcttttcctgcggcaacaaaagtgtttaataagcatatgtgtatgtggcctctgtgtacctgtgacttatgagtgagttcatggatcttagttcttggtaatatgtgtaaggttatattacttccaagaaccaagcaagccaattagcaaatttgttcttctgttaatgctttagttccaaagcggaattttaatgcatttaaagttagactttatgcctttattagatgagcttgcacatgaaaataatggctgagctcggttccctgaaatgagagtgaggcagccatacctgagaaatgcagaaaaaatgttactagggaagagatatcctgaaccattggatgcattgcttagtgtgtaccagaaggataattaacacatttgctcctggtttttctttactctggtggcaatctcggatgcctgtgttagagtgagagaagggctgggggaggaaagggggttgtcctgagacagagtggatgtggttgtacttttcacgtgaatgaaaggatgtttgtgcttctgagatatggggatacctttctgtggtcaggatcatggtgtactcaagcatgtatttcaggggttaaactggaattcccctgcatggggatatgtgtgtcttagggttataggtccatttctgtagtgtgctgtccacatgattgcccaagagacttgggccacaaagtccacaccagcagctctcatgtgggtcactgggttcaagtatgtactcccttgttgcagagctcacatatgtcaaagcatgtatcctgtggggtgtgtgggcctcagggtctcagaatgtggatccgtgctatgcccgtgctcacagttgtctgtatgtctcaaaagcacatagatccccagttatttttctgtattgtggttctcatatacacgtacctccatagctcagtatatgtttctgtactatacacctgttcctgagggagtgatagggttctcgtgtcatggggtccacatttttgtatgcaaacctcctaacacctgggttttacaggtaaagggaagctgaggactgattctagggcagtttgcaggcaatttgcaattctggaagcagacagtgaaaatataattgtggtcctcccttgttctgttctggaacctagagggttaacaggcagctcttccggtccacccccctccttccagcctgtagcttcttgttgccgtggagatggtggccccgccccgatgcagcacctgcccccccattggctgcagtggtgactgtggggctgaggggggagcccaggcctgggcagccattctggagctggagccggagcttggcatccccccacttacattctcttccagcccctcggcccctctaaattcccttgcagccgagcctcagcttcctttttcagcgcttgccatccctctaggctcttggcagactgagctgcatccgcattcacctcccctcctcctcctttccctatccttacttgggagtcccgagaacccccactgtccatccttcctgctccctgcccattcccctgcattctttgcttttcccctccccccaccaaccttctgagcccctgccactgcagtgcacgtggaaccggctccttctcccttccccccacctgccccttccttggattttctgtccccagcttctccccctgctactcttcacaggtctcttccaagacctccccctccagtccagggagggggtcatgggaggcagccctggccctccagacagacaggggttccaggaggtggggggcaggtggaagatgtgcccaccagggggaagaggaaagcctgcctatgggcaatgacctttaacccatctttccccccagctagccccttctggggtgggtgggcaccagggacctagcctccctggatctttggtgtccttcattactggggttttactgaccctctcagccatgctcccctgctgactgccagccccagtcatgggcctaaggcctcccaccccatccccctcagggggctcctgctcaggttccttgccccctccttcccgctgccagcctctccgccgtcgctgctcttcctgctgctttccggggggtaggtgaggccggagctgaggggcagagggaggtgggggcatgcactggggtcaggggtgggaacctgggttaacagcttcccttctggccccctccccaacttcccttctggccatttcctcccctccagaataccacttgggtcgctcgaggaggaagagtgtcccaggggggaagcagtacagcatggagggtgcccctgctgcgcccttccggccctcggtgagtggtgcctaccagatgtggctcagttgggccccctcccctccagccccaactggggccctaggagtctgagaaagagggcaggagggggagagagggagtgagagtgagaaaaagagtgtgtgtctgtgtgtgtctccccacctctttggtttcccccttcttggctctgcccccctgcttctgagaccagccctcccaccttctccaagctgtgtgtgtgtgtatatgtgtgtgtgtgtgtgcttgcactgtacccgtgggagcaaggaagacaaactggtattagggttcctatccccctttcctcgcctctggagacttcccttttccccatcccactttcatccaggggctctctaccagctgagggatgagtaggtagaactgaccctgccccaacccaccccatccccatttcccccccagcaaggcttcctgagccgacggctaaaaagctccatcaaacgaacgaagtcacaacccaaacttgaccggaccagcagctttcgccagatcctgcctcgcttccgaagtgctgaccatgaccggtacaggggctggagcatgtgggatgagattgatgtaatgtagggtctcctgtgtgagatgcagagggagggggttatctgtgtgcaaaggttgaaggattcaactcaagttggttgggggatgtcatggcacaggggacagaacagaaaagaactagaatagggatctgtgagcagcaggagaggggtagggtggcagagagaagacagacagacaggctggaaagggaatgaaggtgaagccaaggagggactcctcagggactcctcaggccaagaaggatgggctctagcccaggatcaaaggagctgtacaggaggagagtgaccctggaggaatgtttaaggaatgcagggaaggggttggtaggtgagtgagcaataggctgtaggtggaagggtgtcagggaaggtcaggaaatacaggggcagcaggttggagtggggctgggggtggctgaatgaatggatgatggctagggctcaaggacctcatcagtgagggaagagacagtatagagcatggcagagaaggggaggctgggacaggtgtgcagggtgacagaatgggaagcaacccatggactgaggcatgaagaagcagccagcggagaagtccagaaggcactgtccctgagaccaggctgaaggagacctccactgtttgcctttgttgcctgccatttggggttcctctctgggtttccccctcacccagtcactccccagggagaaccatgccctccctttcccccatgtctggccacccccaggattgggcaggtagggaggttgggataaagtgagtcacacctttccctgcccccctcccatgttgccagagctggatttggggccggcagggggtgagggcatggtattcctggccgcgggggcgggggggggggtccgggggccgggggagcgtcgcgctgacggcagccagagcctgcgatgacggggctgctataaataacttcttggaggctcccacacccaagctcccctcccgctttcccactgctctctactcttcatcccctgcccatctccataccgcttttgtattgctatcctacccctcattattccatgcccctagccccctttatcttctgccctcctgcagtgatttttttgcattccatcccctcttagccctcacctcggttctcccggccatctctccagttggccttcctcctcttctcctgtcctctgtcttgctgcacatacctttgtctccccctttcttcttcttgccctacctcctcttcttccctagtccgtgtattctgtcttttatcctctttgagctcttttctgcccacagctttctcctatttcttatgcttttccctcactctttcccctgcttctgctaaaacttgtcctcttatgctgtgttcattcattctttgaatcattaaatgtttatcaggcactagccgtgtgccaggcccaggctagacatatctcttctctgtgccttcacttctttacttccactttttcctttatactgaggctctggtttctggggttacctggaggtactacctagaagtgccccaggcccactttgttctctccttttttttttttcttttctgccatggtccatttctgggttgagatatttctagatgtccccagtcctcgcaatcccttaggtgtgagatggtgggagtttcttttttttcctttttttttttttaaatagaaatagggtctcactgtgttgcccagactggtcttgaactcctgggctcaagtgaccctcccacctcggcctttgaaatgttgggattacaggtgtgagccaccaggcccaggtggagcaggggagttccttaaaggattctgatttttctcacatccctcacgtccttcctgataggcagggtttctttctgtgtctgtttgggaagggtgttcagggggccttctctccaagtctccatcctggaacagactgatgatgcagggtacctatgtgtctaagaagagtaggggggccgggcgcggtggctcatgcctgtaatcccagcactttgggaggctgaatcacttgaggtcaggagtttgagaccagcctgaccaacagggtgaaaccccgtctcagctaaaaatacaaaaaaaaaaaagaaaaaaaaattagctgggtgtgctgaggcaggagagacgcttgagcccaggaggcagaagttgcagcaagccgagatcacaccactgtactccagcctgggcgacagagcaagactgtctcaaaaaaaaaaaaaaaaaaaaaaaaaggaagagtgggaagccctgatcccttcctctcctgaacctcctgcctgccagggcccggctgatgcaaagctttaaggagtcacactctcatgagtccttgctgagtcctagcagtgcagctgaggcattggagctcaacttggatgaagattccattatcaagccagtgcacagctccatcctgggccaggagttctgttttgaggtactgggtctggtgggctggggagggccaaaggacaggggtgatggaaggtggggggcagagaggtctagagaaagtggcacaggtggggacatcaaggaaacagaaacttctgggactggaggaaagggtaggccagggaggaagagaaggtagcagagtctcctcccctctgtagccctttccctcaactccacactcctttctaggtaacaacttcatcaggaacaaaatgctttgcctgtcggtctgcggccgaaagagacaaatggattgagaatctgcagcgggcagtaaagcccaacaaggtattggggaataaaggggacacaacctgtgcagggcaaaggttgcaccaacacgggaagctgggggcctagggaggaaagtgagttaaaggaggagaggcttggggaaggagaggattgaggtacagtgtatctggacaagcagggggagacccccattattctgagtcccccatttcttttcgctttctgtactgctaccctgccttacgatctctttccctgccatagaagtcatagacttacagagttgatggggctctggaaattctttagtctagcttccctgcaggcaggaatgcttcactaataccccgcaggacacatcaaatacacttagccaagtttctgtaccttggtttcctctctaagacagagggaactggtggcaatgggttggattaaatgatctctaaggtccctttggcacataaattctatgagtctgttcttcccaaaacttcatgcttccagttctgtcagctattctctgtatcccagtttctagcaagcttacagtcctagtcacactcctctggggggaactcttgtgtcttgatgtccttaaagaactcaacccaagatgctgacatgatctgacctatgcagagtacaaacaccatgttccctttcaacacactgcaatatcacctgagccttaccattagcttgtgctcaattgtatccccccaggcccttactgattcttttttttttttttttgagacagagtctcactctgtcacccaggctggagtgcagtggcgtgatcttggctcactgcaacctccgcctcctgggtttaagcaattcctgtgcctcagcctccccagtagctgggattacaggcatgcaccaccacacccgactaatttttgtatttttagtagagacgaggtttcaccatgttggccaggctagtctcaaactcctgacctcaggttgtctgcctgcctcagcctcccaaagtgctaggattacaggcatgagccaccacatctggccaagctttacccattctatatgcaattcttttttcacaatttctgatagtctctgcaggactttccagttcccttcaaattctacattaatatttttggcttgttattccagcttttgaaatctttccaatactgtttgtgttgtctagtgtatgtctacgcttctacagtagcttcctggggctgctataacaaactgctacaaactgggtcacgtaaaacaacagaaatttattctctcacagttcaggaggctggaagtccaaaagcaaggtatcagcagggccacgctctctttgatgctgtagcagggaatccttccttgcctcttcctagcttccggaggttgccagcagtccttggcattcctgggcttataactgcatccgtctaatttctgcctccatcttcatgtagctggcttccttctgtgtgtctctgtatcctgtatctctgtgtctccaaatctccctctccatataaagacaccagtttttataaggtgggttaagggtccactctaattcagtatggcctcttttttttgagatggaatatcgctcttgtttcccaggcttggagtgcaatggcatgagctcagctcactgcaacctccgccttccaggttcaagtgattctcctgcctcagcctcctgagtagctgggattacaggcacgtgccactatgcccagctaatttgtttttgtatttttattagagacggggtttcactatgttggccaggctggctcgaactcctgacctcaggcaatccacccacctcggcctcccaaagtgctgggattacaggaatgagataccatggctggcctcttcttagtttgattacatttgcagggatcctgtttccaaataagatcacattcacaggttcagggtagacatgagttttggtgggatactattcaacccagtacaccgtctcaccttatgattgctgtctgtatcccactttcttactgtctctcctcttttggtgtctctctgtcccttccccctttaacatcatgcccaccccaccatgccaggacaacagccgccgggtagacaatgtgctaaagctgtggatcatagaggcccgggagctgccccccaagaagcggtactactgtgagctctgcctggatgacatgctgtatgcacgcaccacctccaagccccgctctgcctctggggacaccgtcttctggggcgagcacttcgagtttaacaacctgccggctgtccgtgccctgcggctgcatctgtaccgtgactcagacaaaaagcgcaagaaggacaaggcaggctatgtcggcctggtgactgtgccagtggccaccctggctgggcgccacttcacagagcagtggtaccctgtaaccctgccaacaggcagtgggggatctgggggcatgggttcgggagggggagggggctcggggggtggctcagggggcaagggcaaaggaggttgcccggctgtgcggctgaaagcacgttaccagacaatgagcatcttgcccatggagctatataaagagtttgcagagtatgtcaccaaccattatcggatgctgtgtgcagtcttggagcccgccctgaatgtcaaaggcaaggaggaggttgccagtgcactagttcacatcctgcagagtacaggcaaggccaaggtgagtgttgtgccctcagggaaaggtgacttgggaatgggcacttgcttgggggttagtgaggacagggcaaattcacgagattgggttgtgcagaggctgacacttggattttcctgggcctcaggacttcctttcagacatggccatgtctgaggtagaccggttcatggaacgggagcacctcatattccgcgagaacacgcttgccactaaagccatagaagagtatatgagactgattggtcagaaatacctcaaggatgccattggtatggcccacactcaggccctcttcttcccaaacctgccagatgtccaccccagaccccaagtccacccttccacagcttgatacttcctaacccagagtcctaggactccagcctccaacacctgattctgaaatttccccaaccctggccacccccttccctgcccttggaaagtgtgaccacaccctcttgtgcccccaccccccaggagaattcatccgtgctctgtatgaatctgaggaaaactgcgaggtagaccctatcaagtgcacagcatccagtttggcagagcaccaggccaacctgcgaatgtgctgtgagttggccctgtgcaaggtggtcaactcccactggtgagactgggaacgctgggctggggggccagggtcgggggaattatgtgttcatctgttcatctatctgtccatcctcaaagaggactgagcaccatttatgggcaaagcattgttctaggcgctatagagcaaacaggtgaaagaggcctggtccctgccctcagagggcctccaccagaatggggacaaattagaagaaaaaaaaaaaaagccacagagccataatggtgtgtaagtgctgagtaagggtccccccaacctctgtgtgacataaggtcagagagaaggcagagctttgagataagtggggaagaggtgcccccttgggtaggctttgaagactggtttaggttctgatatatggacatagttggcaagaaagacatttcagaagaaggctgtgagaaaggcacatgtgtgatggtgaaaaggcccaggagttttcaggggacattaaagtaggttagtagcaattacatcaggtttagtggagcatgtgcctcataatggggagtggcgggagagatgtctgggcaggaagattagctttagaaactggaaggcctcaaggagtctgaggtcattggtaggccttgggatgccattaaaggtgtcagaaatattgtgatttagaagattaatccataggctgggcacggtggctcacacctgtaataccagcactttgggaggctgaggcgggcagaccacctgaggtcaggagtttgagaccaggctgaccaacatggagaaaccctgtctctactaaaaatacaaaattagccagatgtggtggcacatgcctgtaatcccagctattcgggaggctaaggcaggagaatcacttgaatctgggaggtggaggttgtagtgagccgagatcacacgattgcactctagcctgggcaacaagagtgaaactccatctcaaaaaaaaaaaattaatccataagtagagtgtatgtagtagagtagagggatgtatgttgggggatgactggaatagagccagctgggggctcggaggcatgaaagtcagatcctgaatcagaacagtgacagaagttaggaaggagctactggaaggaccctctcgggaaaggatcagtaggaattgtcagcttattggaaaggagggagcatgtctgtggggagtcacggatgactcaagaggccatgaggctggtggttgggagaccggtggcctcattgacaaccaggaaagtcaggaggaggagccagttggaggtgtgggggcgatggtgagctctgctttacaccagccgagtttaaggtgtcagtgggacattgaagtggaactgggaggtgcggggagtgagctctgagccattccagggactggggatcatgcctggggcacctccatccccatttccctggaatccagaagagttggggggtccgagctccctgtacctcaagtgaccctccatctctctcccatctctgtctctccctggtgtctgtttttcttctcctcctctccttgtctctctcccacacccctccatctctctcccacgtgtctctcccctcaccttctctccccctccatttctctctccctaatctgtctgttccctctgccatggcccccttcttcaagcagcctcccatcttgctcctgcggtccctccttccctgtctctctcacccctgtttccacaccctcacctcctaccacccccctcagcatgttccctggaagctgagggtctctggggctcagtcccggtctctctctttctctctctctctctctgtctccccgacccttccccccagcgtgttcccgagggagctgaaggaggtgtttgcttcgtggcggctgcgctgcgcagagcgaggccgggaggacatcgcagacaggcttatcagcgcctcactcttcctgcgcttcctctgcccagcgattatgtcgcccagtctctttgggcttatgcaggagtacccagatgagcagacctcacgaaccctcaccctcattgccaaggtcatccagaacctggccaacttttccaagtgagggaagcttcaggagtgggcagggcagggagtggcagggcagggagtggcagggctgggggtcggcaagaagggtctcctgagtccccagagatcctgagatggggaggctatgataccttgtgtgtgtgtgtatgtgtgtgtatgtgtgtgtgtgtgtgtgtgtgtgtgtatgtgacctttatcttctgcattcttggctaggtttacctcaaaggaggactttctgggcttcatgaatgagtttctggagctggaatggggttccatgcagcagtttttgtatgagatctccaatctggacacgctaaccaacagcagtagctttgagggttacatcgacttgggccgagagctctccacactgcatgccctactctgggaggtgctgccccagctcagcaaggtcagcagatcccctctttgccctatccccagatggctccagaggttcctggagcctgagaaactaccctttgaagattttttttctccccttgtttctcgaggtgtcaccactactatcccaactcaggccccctccacctgcaccctcagaggccctcttagagctgggcactgagcccccaggtaacagcctcacccttccaggaagccctcctgaagctgggtccactgccccggctcctcaacgacatcagcacagctctgaggaaccccaacatccaaaggcagccaagccgccagagtgagcggccccggcctcagcctgtggtactgcgggggccatcggctgagatgcagggctacatgatgcgggacctcaacaggtgagcaccctgggacagccaggcctgtgccctaggagcccttctcctattctagatactcctcactgggccccacatgcatctctctagggcttgaaagaagggaggaaaaagcaccaagttctcaggggagacgataaggagacaggtacagtcagtggtaggctgagagccctttacagcctgagggagtgagagatttggagctctaggaatagggctgaggctccaccaactcacggcttagttgtaagcctagagcatccctgctgcaagctctgatttgctgtccctctgcctgcccatgctagtccccaggctgaggttcagccagcatgtcatgtcagccatgtgtcaaaatgttcaaacatctcagtaatagctagtgaataagcacttcccccagcccccgaccacaaccccacagacctccccatgatccagcacttagagcagtgacagcagaagcctagcagggcctgcagcctgctccagagtcccagcctccattctgataggtggtgcccgtgcttcatttgctgctcattattttgatgatggccctgctttttcctctgcccgtgtcttcctccatgacaccatacccatcccaccattcccgcctctcctttcatttgtccacatctctctccttctctgtctgtgctcgcccctctttccatctctctccagctccatcgaccttcagtccttcatggctcgaggcctcaacaggtgaggggctctcccctcccccgccctcctctcctctcctgtctgttccctctcccactccactggccttcgccctactcctctcctctcctcctccatggacctcatctcctccatatgtgcccagccctgcccccatcccttctcttgctgcccccatctcccctcctctaggcctcacccccttcccggaggggccctgtcctttccctttactcacctgtcccctcccatcctccctgcctgccctcttcagggctgccaccgctagctctcagcccttccctctgggtcccacttttcaccccaaggcctgtgccagaccacagcaaggttcaattgctaggagccctgaccttaccttctgcttgtgtgcccccttcccttctgacagctctatggacatggctcgcctcccctccccaaccaaggaaaagccacccccaccaccgcctggtggtggtaaagacctgttctatgtaagccgtccacccctggcccgttcctcaccagcatactgcacgagcagctcggacatcacagagccagagcagaagatgctgagtgtcaacaagagtgtgtccatgctggacttacagggtgatgggcctggtggccgcctcaacagcagcagtgtttcgaacctggcggccgtaggggacctgctgcactcaagccaggcctcgctgacagcagccttggggctacggcctgcgcctgccggacgcctctcccaggggagtggctcatccatcacggcggctggcatgcgcctcagccagatgggtgtcaccacagacggtgtccctgcccagcaactgcgaatccccctctccttccagaaccctctcttccacatggctgctgatgggccaggtcccccaggcggccatggagggggcggtggccatggcccaccttcctcccatcaccaccaccaccaccatcaccaccaccgaggtggagagccccctggggacacctttgccccattccatggctatagcaagagtgaggacctctcttccggggtccccaagccccctgctgcctccatccttcatagccacagctacagtgatgagtttggaccctctggcactgacttcacccgtcggcagctttcactccaggacaacctgcagcacatgctgtcccctccccagatcaccattggtccccagaggccagccccctcagggcctggaggtgggagcggtgggggcagcggtgggggtggcgggggccagccgcctccattgcagaggggcaagtctcagcagttgacagtcagcgcagcccagaaaccccggccatccagcgggaatctattgcagtccccagagccaagttatggccccgcccgtccacggcaacagagcctcagcaaggagggcagcattgggggcagcgggggcagcggtggcggagggggtggggggctgaagccctccatcaccaagcaggtaggtgaaggcaggaggaaggcgggctgggtcacaacagggagggaagaaggagatggggggtggggttgaaacagagtctgtggcctgaagttacaatcttcttgcctccttttggccattaaacaaatgtgtatagagggcctgctatgtgccatgtgctatgccaggcactaaggatacggcactgaaccctcttagcactctcattccagaggggattaatccataagtagaatgggggtgactggaatagggccagctgggggcttggaggcatgaagatcagatcctgaatcagaacaacaggagaaattctctggcattcaactcacatctctggcattcagaggtgataaaggctacagcagggcaataggactgggactgtcgtctcctttggctgtgctgttgccctctaaatgtaccctgctttttcccaccttttctttctctgttcgccctcactgtgccttgtcccagcattctcagacaccatccacattgaaccccacaatgccagcctctgagcggacagtggcctgggtctccaacatgcctcacctgtcggctgacatcgagagtgcccacatcgagcgggaagagtacaagctcaaggagtactcaaaatcgatggatgagagccggctggatagggtacgatgggctctaccagctccaagccccagtgtttccttttacccacaggggagatctctagtcacttccaagggaaacctccagggtcagttatggtggtaagaaaaggcaaagacctgatcacctcttgagaagccttccgtccatctggggagaccagatacacacagttgttaaaagtcactttcaactctattttgtaggttatatatatcatagactatctggggatcatctattttaggcttacctccatgttcttccccaggaggaacataagccctggctcctgtgactgcttaggaaaggaaatgttactttactggcagtaggagctaataaattggatggggatggagggggttgcagctatattacaagtgatgtctggcctacccagtcactgtcccatgggcataagtgacagtcagtgggcagggaatgcatgtggtaaagtagtatgtatcagtcatgtgtgaaaagaccatccagaccctcacttggtggaggctgagggcaaagggcaccaagagctctggggctaacacagataacttagcagaaagttacttgaggaagctgttgttcctagggcctgaggaagagggcggctgcaggattaggtcatatataaagaacatatgatcctaacacggggaagtggtctttgagcataggaaatgttgggactgactcagatgggcttgaccagcaaatttaatgagaattaaaccctaatattagccccaaggcagccaccgtaggaagttaattcacatctctcctctgcatgtagaagggttggtgatatatgtatgtatcctcttcagagaatgaggaaatagtcttttgaatcatttttttttctgtgcttcagatgaggaaaccttgttgagaaaggctgtagactagcactatccaatataactttctgcagtgatgaaatgttctgtaatctgtagtgttcacatgtgtctagttgtgattcaggaactgaatttttagatc

SEQ ID NO: 206 - DNA, 26 bp, Artificial Sequence
  chemically treated genomic DNA (Homo sapiens)
ggggttttaggttttagtgtttattt

SEQ ID NO: 207 - DNA, 24 bp, Artificial Sequence
  chemically treated genomic DNA (Homo sapiens)
ctccaaaaaccaccttcctaacac

SEQ ID NO: 208 - DNA, 38 bp, Artificial Sequence
  chemically treated genomic DNA (Homo sapiens)
aattcgggtatttttattggtataaggaaggtgggtag

SEQ ID NO: 209 - DNA, 40 bp, Artificial Sequence
  chemically treated genomic DNA (Homo sapiens)
gtatcgttttgaagatagcgttatttattattgtagtcgg

SEQ ID NO: 210 - DNA, 39 bp, Artificial Sequence
  chemically treated genomic DNA (Homo sapiens)
cctaacacattcaccactaaaaaccacacaaaataaacc

SEQ ID NO: 211 - DNA, 30 bp, Artificial Sequence
  chemically treated genomic DNA (Homo sapiens)
gtattttgagttatgagttggagttgttgt

SEQ ID NO: 212 - DNA, 35 bp, Artificial Sequence
  chemically treated genomic DNA (Homo sapiens)
aactatataaactaaaaaactactcttcactaacc

SEQ ID NO: 213 - DNA, 31 bp, Artificial Sequence
  chemically treated genomic DNA (Homo sapiens)
tttggtttgttgatgagtcgtttaatgcgtt

SEQ ID NO: 214 - DNA, 29 bp, Artificial Sequence
  chemically treated genomic DNA (Homo sapiens)
ttaatttttgggtagcgggtgttacggta

SEQ ID NO: 215 - DNA, 39 bp, Artificial Sequence
  chemically treated genomic DNA (Homo sapiens)
ctcttcactaaccaaccatatcataaaacaacacatccc

SEQ ID NO: 216 - DNA, 38 bp, Artificial Sequence
  chemically treated genomic DNA (Homo sapiens)
aatttgggtatttttattggtataaggaaggtgggtag

SEQ ID NO: 217 - DNA, 40 bp, Artificial Sequence
  chemically treated genomic DNA (Homo sapiens)
gtattgttttgaagatagtgttatttattattgtagttgg

SEQ ID NO: 218 - DNA, 39 bp, Artificial Sequence
  chemically treated genomic DNA (Homo sapiens)
cctaacacgttcgccgctaaaaaccacgcaaaataaacc

SEQ ID NO: 219 - DNA, 31 bp, Artificial Sequence
  chemically treated genomic DNA (Homo sapiens)
tttggtttgttgatgagttgtttaatgtgtt

SEQ ID NO: 220 - DNA, 29 bp, Artificial Sequence
  chemically treated genomic DNA (Homo sapiens)
ttaatttttgggtagtgggtgttatggta

SEQ ID NO: 221 - DNA, 39 bp, Artificial Sequence
  chemically treated genomic DNA (Homo sapiens)
ctcttcactaaccgaccgtatcataaaacaacgcatccc
